(19) United States
(12) Patent Application Publication
(10) Pub. No.: US 2023/0242905 A1
(43) Pub. Date: Aug. 3, 2023

(54) Method for Engineering Novel Hybrid AAV Capsids Through Hyper Variable Regions Swapping

(71) Applicants: Genethon, Evry-Courcouronnes (FR); Institut National de la Santé et de la Recherche Médicale, Paris (FR); Universite d'Evry Val d'Essonne, Evry (FR)

(72) Inventors: Giuseppe Ronzitti, Fontainebleau (FR); Tiziana Labella, Paris (FR)

(73) Assignees: Genethon, Evry-Courcouronnes (FR); Institut National de la Santé et de la Recherche Médicale, Paris (FR); Universite d'Evry Val d'Essonne, Evry (FR)

(21) Appl. No.: 18/013,339

(22) PCT Filed: Jul. 5, 2021
(86) PCT No.: PCT/EP2021/068553

§ 371 Date: Dec. 28, 2022

(30) Foreign Application Priority Data
Jul. 3, 2020 (EP) 20305757.5

(51) Int. Cl. C12N 15/10; C12N 15/86

(52) U.S. Cl. CPC C12N 15/1082; C12N 15/86; C12N 2750/14122; C12N 2750/14143; C12N 2750/14145; C12N 2750/14152

(57) ABSTRACT

The invention relates to a method of preparation of a recombinant hybrid adeno-associated virus (AAV) capsid protein with improved tropism and to the recombinant hybrid AAV capsid protein obtainable by the method. The invention relates also to the derived expression vector, modified cell, and hybrid capsid AAV vector particle packaging a gene of interest, and its use in tissue-targeted gene therapy for treating various diseases.

### FIELD OF THE INVENTION

[0001] The invention relates to a method of preparation of a recombinant hybrid adeno-associated virus (AAV) capsid protein with improved tropism, in particular for muscle and/or central nervous system, and to the recombinant hybrid AAV capsid protein obtainable by the method. The invention relates also to the derived expression vector, modified cell, and hybrid capsid AAV vector particle packaging a gene of interest, and its use in tissue-targeted gene therapy for treating various diseases, in particular muscle and/or central nervous system diseases.

### BACKGROUND OF THE INVENTION

[0002] Recombinant AAV (rAAV) vectors represent the leading platform for gene therapy in a wide spectrum of organs for the treatment of a variety of human diseases. The exponential growth of clinical trials using rAAV reflects the enormous potential of this system and its high versatility (Valdmanis P N et al., Hum. Gene Ther., 2017, 28, 361-372; Wang D et al., Nat. Rev. Drug Discov., 2019, 18, 358-378).

[0003] AAV is a non-pathogenic virus belonging to the genus Dependoparvovirus within the family Parvoviridae. AAV is a non-enveloped virus composed of a capsid of about 26 nm in diameter and a single-stranded DNA genome of 4.7 kb. The genome carries two genes, rep and cap, flanked by two palindromic regions named Inverted terminal Repeats (ITR) that serve as the viral origins of replication and the packaging signal. The cap gene codes for three structural proteins VP1, VP2 and VP3 that compose the AAV capsid through alternative splicing and translation from different start codons. VP1, VP2 and VP3 share the same C-terminal end which is all of VP3. Using AAV2 has a reference, VP1 has a 735 amino acid sequence (GenBank accession number YP_680426.1 accessed on 13 Aug. 2018); VP2 (598 amino acids) starts at the Threonine 138 (T138) and VP3 (533 amino acids) starts at the methionine 203 (M203). The rep gene encodes four proteins required for viral replication Rep78, Rep68, Rep52 and Rep40. Recombinant AAV vectors encapsidate an ITR-flanked rAAV genome in which a therapeutic gene expression cassette replaces the AAV protein coding-sequences.

[0004] The development of an efficacious AAV platform is the result of a synergic approach between capsid and vector genome design. In this context, the capsid plays a crucial role in tissue targeting through its interaction with cellular receptors and the following downstream internalization events. Tissue tropism and transduction efficiency are directly linked to the sequence and conformation of the looped-out domains of the VP proteins that compose the capsids. Noteworthy, the amino acid variability of VP sequence of different AAV serotypes clusters in 12 hypervariable regions (HVR) which mainly corresponds to the looped-out domains (Gao G et al., Proc Natl Acad Sci USA., 2003, 100, 6081-6086).

[0005] Strategies for developing new capsids can be categorized in four main approaches: natural discovery, rational design, directed evolution and in silico discovery (Wang D et al. Nat. Rev. Drug Discov. 2019, 100, 6081-6086). Natural discovery consists in the isolation of wild type AAV that naturally infect animals, including human and non-human primate. Notably, AAV isolated from human sources, such as AAV9, are the most promising serotypes (Gao G et al., J Virol., 2004, 78, 6381-6388).

[0006] Rational design strategy mainly involves the grafting of peptide that confer new properties to the capsid, like increase the receptor binding or deter immunological recognition (Chen Y H et al., Nat. Med., 2009, 15, 1215-1218; Asokan A et al., Nat. Biotechnol., 2010, 28, 79-82).

[0007] Direct evolution approach simulates the natural evolution. Basically, by using error-prone PCR or capsids shuffling strategies a library of randomized capsids is generated and submitted to selective pressure in order to select capsids with specific properties (Wang D et al., Nat. Rev. Drug Discov., 2019, 18, 358-378). Finally, with advancement of the high-throughput sequencing, the bioinformatics met the field of capsid development, this approach is named in silico discovery. Bioinformatic tools can be used to predict the capsids regions that better tolerate manipulation, or to infer evolutionary intermediated of known capsid, an approach exemplified by the discovery of the ancestral capsid Anc80 (Marsic, D. et al., Mol. Ther., 2014, 22, 1900-1909; Zinn E et al., Cell Rep., 2015, 12, 1056-1068).

[0008] However, each approach has specific limitations that may affect the transduction efficiency of rAAV (Wang D et al. Nat. Rev. Drug Discov., 2019, 18, 358-378). First, AAV infection is endemic in human population, therefore the rAAV has to face the pre-existing capsid immunity, especially when using capsid isolated from human sources (Boutin et al., Human Gene Therapy, 2010, June; 21(6):704-12. doi: 10.1089/hum.2009.182). Rational design approach can help to overcome this problem, however the insufficient knowledge on the stability of modified capsid, AAV receptor binding, internalization and cellular trafficking poses a major limitation to this strategy. In addition, the choice of the animal model is crucial to proper select novel capsids with the best performances for gene therapy application in human. This is particularly true when using an approach of direct evolution, where capsids selection is deeply rooted by the model system.

[0009] To improve AAV vectors used in gene therapy, there is a need for novel AAV capsid engineering strategies that at least partly overcome the limitations of existing approaches.

### SUMMARY OF THE INVENTION

[0010] The inventors have shown that combination of hypervariable regions (HVRs) from different AAV serotypes can result in mixed features of parental capsids outperforming their original efficacies. In particular, the inventors have obtained hybrid AAV capsids which advantageously improve the tropism compared to at least the parent acceptor capsid and at the same time maintain the low seroprevalence of the acceptor capsid. This is surprising since the sequence and conformation of the 12 HVRs are directly involved in both the tropism and seroprevalence of AAV capsids, the molecular determinants of which remain to be fully elucidated. Therefore, it is unexpected to improve the tropism without impairing the seroprevalence.

[0011] Therefore, the invention relates to a method of preparation of a recombinant hybrid adeno-associated virus (AAV) capsid protein with improved tropism for muscle and/or central nervous system, comprising the steps of
[0012] a) providing at least two recombinant AAV capsid proteins from different AAV serotypes, an acceptor AAV capsid protein and at least one donor AAV capsid protein; wherein the donor AAV capsid serotype is AAV13 or hybrid AAV2/13;
[0013] b) replacing at least one hypervariable region (HVR) sequence chosen from HVR1 to HVR10 and HVR12 sequences of the acceptor AAV capsid protein with a different HVR sequence from the corresponding HVR of a donor AAV capsid protein, to obtain a recombinant hybrid AAV capsid protein with improved tropism for muscle and/or central nervous system compared to at least the parent acceptor AAV capsid protein.

[0014] In some embodiments of the method according to the invention, the acceptor AAV capsid serotype has a low seroprevalence and the donor AAV capsid serotype(s) has a higher seroprevalence than the acceptor AAV capsid serotype. In some preferred embodiments of the method according to the invention, the hybrid AAV capsid protein has a seroprevalence equivalent to the seroprevalence of the acceptor AAV capsid protein.

[0015] In some preferred embodiments of the method according to the invention, the acceptor AAV capsid serotype is selected from the group consisting of: AAV8, AAV9, AAV5, AAVrh10, AAV-LK03, AAVrh74, AAV9.rh74, AAV9.rh74-P1 and/or the donor AAV capsid serotype(s) is selected from the group consisting of AAV13, and the sequences SEQ ID NO: 2 to 30.

[0016] In some embodiments of the method according to the invention, the HVR sequence(s) of the donor AAV capsid protein and/or acceptor AAV capsid protein(s) are selected from the group consisting of an HVR1 sequence from positions 134 to 165, an HVR2 sequence from positions 176 to 192; an HVR3 sequence from positions 259 to 278; an HVR4 sequence from positions 379 to 395; an HVR5 sequence from positions 446 to 484; an HVR6 sequence from positions 490 to 500; an HVR7 sequence from positions 501 to 512; an HVR8 sequence from positions 514 to 529; an HVR9 sequence from positions 531 to 570; an HVR10 sequence from positions 576 to 613; and an HVR12 sequence from positions 705 to 736; the indicated positions being determined by alignment with SEQ ID NO: 1.

[0017] In some embodiments of the method according to the invention, step b) comprises replacing less than 8 HVR sequences of the acceptor AAV capsid protein with different HVR sequence(s) from the corresponding HVR(s) of the donor AAV capsid protein(s); preferably step b) comprises replacing up to 6 HVR sequences, preferably up to 4 HVR sequences, of the acceptor AAV capsid protein with different HVR sequence(s) from the corresponding HVR(s) of the donor AAV capsid protein(s).

[0018] In some preferred embodiments of the method according to the invention, step b) comprises replacing at least HVR5 sequence of the acceptor AAV capsid protein with a different HVR5 sequence from the donor AAV capsid protein; preferably the HVR5 sequence from the donor AAV capsid protein comprises a sequence selected from the group consisting of SEQ ID NO: 175 to 186; preferably step b) comprises replacing HVR5 sequence alone or in combination with one or more or all of HVR6, HVR7, HVR8, HVR9 and HVR10 of the acceptor AAV capsid protein; preferably step b) comprises replacing HVR5 sequence alone or in combination with one or more or all of HVR6, HVR7 and HVR8 of the acceptor AAV capsid protein.

[0019] In some embodiments of the method according to the invention, step b) comprises replacing all of HVR5 to HVR10 sequences of the acceptor AAV capsid protein with different HVR sequence(s) from the corresponding HVR(s) of the donor AAV capsid protein(s); preferably step b) comprises replacing all of HVR5 to HVR8 sequences of the acceptor AAV capsid protein with different HVR sequence(s) from the corresponding HVR(s) of the donor AAV capsid protein(s).

[0020] In some embodiments of the method according to the invention, step b) comprises replacing any one of HVR1 to HVR10, and HVR12 sequence of the acceptor AAV capsid protein with a different HVR sequence from the corresponding HVR of the donor AAV capsid protein; preferably step b) comprises replacing HVR3, HVR5, HVR9, HVR10 or HVR12 sequence of the acceptor AAV capsid protein with a different HVR sequence from the corresponding HVR from the donor AAV capsid protein. In some more preferred embodiment, step b) comprises replacing HVR5 of the acceptor AAV capsid protein with a different HVR5 sequence from the donor AAV capsid protein.

[0021] Another aspect of the invention relates to a recombinant hybrid AAV capsid protein with improved tropism obtainable by the method according to the present disclosure.

[0022] In some particular embodiments, the recombinant hybrid AAV capsid protein comprises an amino acid sequence selected from the group consisting of the sequences SEQ ID NO: 33 to 43, 45, 47 to 58 and 60 to 73 and the sequences having at least 85% identity with said sequences, and wherein the amino acid sequence variant has no mutations in at least the HVR sequences from the donor AAV capsid protein or all the HVR sequences.

[0023] Another aspect of the invention relates to a recombinant plasmid comprising a polynucleotide encoding the recombinant hybrid AAV capsid protein according to the present disclosure in expressible form; preferably selected from the nucleotide sequences SEQ ID NO: 78, 80, 82, 84, 86, 88, 90, 92, 94, 96, 98, 102, 106, 108, 110, 112, 114, 116, 118, 120, 122, 124, 126, 128, 132, 134, 136, 138, 140, 142, 144, 146, 148, 150, 152, 154, 156, 158, and eventually further encoding AAV Replicase protein in expressible form.

[0024] Another aspect of the invention relates to a cell stably transformed with a recombinant plasmid according to the present disclosure.

[0025] Another aspect of the invention relates to an AAV vector particle packaging a gene of interest, which comprises at least one hybrid recombinant AAV capsid protein according to the present disclosure; preferably wherein the gene of interest is selected from the group consisting of: therapeutic genes; genes encoding therapeutic proteins or peptides such as therapeutic antibodies or antibody fragments and genome editing enzymes; and genes encoding therapeutic RNAs such as interfering RNAs, guide RNAs for genome editing and antisense RNAs capable of exon skipping.

[0026] Another aspect of the invention relates to a pharmaceutical composition comprising a therapeutically effective amount of AAV vector particle according to the present disclosure or cell stably transduced by said AAV vector particle. The invention also encompasses the AAV vector particle, cell or pharmaceutical composition of the present disclosure as a medicament, in particular for use in the treatment of a muscle and/or CNS disease, preferably a genetic neuromuscular disease.

### DETAILED DESCRIPTION OF THE INVENTION

### Method of Preparation of Hybrid AAV Capsids

[0027] Therefore, the invention relates to a method of preparation of a recombinant hybrid adeno-associated virus (AAV) capsid protein with improved tropism, in particular for muscle and/or CNS, comprising the steps of
[0028] a) providing at least two recombinant AAV capsid proteins from different AAV serotypes, an acceptor AAV capsid protein and at least one donor AAV capsid protein;
[0029] b) replacing at least one hypervariable region (HVR) sequence of the acceptor AAV capsid protein with a different HVR sequence from the corresponding HVR of a donor AAV capsid protein, to obtain a recombinant hybrid AAV capsid protein with improved tropism, in particular for muscle and/or CNS, compared to at least the parent acceptor AAV capsid protein(s).

[0030] As used herein “AAV serotype” or “AAV capsid serotype” refers to an AAV capsid having distinct hypervariable region (HVR) amino acid sequences compared to an AAV capsid of another serotype. Different AAV serotypes have amino acid variation in their HVR sequences. The term AAV serotype encompasses any natural or artificial AAV capsid serotype including AAV capsid variants isolated from primate (human or non-human) or non-primate species and AAV capsid variants engineered by various techniques known in the art such as for example rational design, directed evolution and in silico discovery. As used herein, the term AAV serotype refers to a functional AAV capsid which is able to form recombinant AAV viral particles which transduce a cell, tissue or organ, in particular a cell tissue or organ of interest (target cell, tissue or organ) and express a transgene in said cell, tissue or organ, in particular target cell tissue or organ.

[0031] As used herein, “hypervariable region or HVR” refers to any one of HVR1 to HVR12 of an AAV capsid. According to a narrow definition of HVR, HVR1 is from positions 146 to 153; HVR2 from positions 183-187; HVR3 from positions 263 to 267; HVR4 from positions 384 to 386; HVR5 from positions 453 to 477; HVR6 from positions 493 to 498; HVR7 from positions 503 to 507; HVR8 is from positions 517 to 525; HVR9 from positions 536 to 559; HVR10 from positions 584 to 597; HVR11 from positions 661 to 670; and HVR12 from positions 708 to 722; the indicated positions being determined by alignment with SEQ ID NO: 1 (VP1 of AAV8 or AAV8 capsid). After sequence alignment of any other AAV capsid sequence of any other serotype with SEQ ID NO: 1 using standard protein sequence alignment programs that are well-known in the art, such as for example BLAST, FASTA, CLUSTALW, MEGA and the like, a person skilled in the art can easily obtained the corresponding positions of the hypervariable regions in other AAV capsid serotypes. For example using MEGA software (version X) with ClustalW alignment algorithm at default parameters, HVR1 to HVR12 are from positions 146 to 152, 182 to 186, 262 to 264, 381 to 383, 450 to 474, 490 to 495, 500 to 504, 514 to 522, 533 to 556, 581 to 594, 658 to 667 and 705 to 719, respectively of the capsid of SEQ ID NO: 2 (named #704).

[0032] The positions of the HVR sequence from the donor or acceptor AAV capsids may differ from the positions indicated above (HVR reference sequence) by few amino acids. Depending on the initial size of the HVR and the distance between the different HVRs, both HVR sequences (replaced sequence from the acceptor capsid and replacement sequence from the donor capsid(s)) consist of at least 2 amino acids to about 70 amino acids. For example the HVR sequence from the donor or acceptor AAV capsids may have a deletion of 1 amino acid at one end of a HVR sequence of up to 5 amino acids; a deletion of up to 2 amino acids (1 or 2 amino acids) at one or both ends of a HVR sequence of 6 to 10 amino acids; a deletion of up to 5 amino acids (1, 2, 3, 4 or 5 amino acids) at one or both ends of a HVR sequence of 11 to 25 amino acids. Alternatively, the HVR sequence from the donor or acceptor AAV capsid may have additional sequence from the N- or C-terminus of the HVR sequence, for example up to 10, 20, 30, 40 or 50 amino acids from the N- or C-terminus of the HVR sequence. Preferably, the amino acid deletion or addition at one or both ends of the HVR sequence involves consecutive amino acids from the donor or acceptor AAV capsid sequence.

[0033] As used herein, the term “tropism” refers to the capacity of an AAV capsid protein present in a recombinant AAV viral particle, to transduce some particular type(s) of cell(s), tissue(s) or organ(s) (e.g, cellular or tissue tropism). The tropism of the recombinant hybrid AAV capsid protein (or hybrid AAV capsid) according to the invention for a particular type of cell, tissue or organ may be determined by measuring the ability of AAV vector particles comprising the hybrid AAV capsid protein (hybrid capsid serotype AAV vector particles) to transduce said particular type of cell, tissue or organ or express a transgene in said particular type of cell, tissue or organ, using standard assays that are well-known in the art such as those disclosed in the examples of the present application. For example, vector transduction or transgene expression are determined by local or systemic administration of hybrid capsid serotype AAV vector particles in animal models such as mouse models that are well known in the art and disclosed in the examples of the present application. Parent AAV vector serotypes comprising the donor or acceptor capsids are used for comparison. Vector transduction may be determined by measuring vector genome copy number per diploid genome by standard assays that are well known in the art such as real-time PCR assay. Transgene expression is advantageously measured using a reporter gene such as luciferase or fluorescent protein (GFP or others) by standard assays that are well known in the art such as in vivo or in vitro quantitative bioluminescence or fluorescence assays in vivo or in vitro.

[0034] The hybrid AAV capsid protein is a functional AAV capsid which is able to form recombinant AAV viral particles which transduce a cell, tissue or organ, in particular a cell tissue or organ of interest (target cell, tissue or organ) and express a transgene in said cell, tissue or organ, in particular target cell tissue or organ. Furthermore, the hybrid AAV capsid protein has improved tropism compared to its parent AAV capsid protein(s). The hybrid AAV capsid protein which has improved tropism may have an increased tropism for at least one target cell, tissue or organ and/or a decreased tropism (or detargeting) for at least one off-target cell, tissue or organ compared to at least the parent acceptor AAV capsid. An increased tropism refers in particular to a transgene expression level that is increased by at least 1.5 fold, preferably 2, 3, 4, 5 folds or more in at least one target cell, tissue or organ, compared to parent AAV capsid protein(s). A detargeting refers in particular to a transgene expression level that is decreased by at least 3 fold, preferably 5 to 10 folds or more in at least one off-target cell, tissue or organ, compared to a non-detargeted parent AAV capsid protein. The transgene expression levels achieved with the hybrid AAV capsid protein in the target cell, tissue or organ is advantageously at least of the same magnitude (less than 1.5 fold lower; i.e equivalent to) as that of a reference AAV serotype such as AAV9 for muscle and CNS tissues. As a results of its improved tropism, the hybrid AAV capsid protein according to the invention has an improved biodistribution. This means that it targets significantly better a defined tissue (target tissue), group of tissues (for example skeletal muscle and heart) or organ (target tissue(s) or organ) without increasing the targeting of other (non-target) tissues (e.g. improved specificity) and/or it targets a specific tissue (non-target or off-target tissue or organ) with a lower efficacy (tissue detargeting, for example liver detargeting), usually to reduce unwanted toxicities.

[0035] As used herein, the term “muscle” refers to cardiac muscle (i.e. heart) and skeletal muscle. The term “muscle cells” refers to myocytes, myotubes, myoblasts, and/or satellite cells. The skeletal muscles are classified in different groups based on their anatomical position in the body. The tropism of the hybrid AAV capsid according to the invention for different muscle groups may be measured in mice Tibialis (TA), Extensor Digitorum Longus (EDL), Quadriceps (Qua), Gastrocnemius (Ga), Soleus (Sol), Triceps, Biceps and/or Diaphragm; in particular in mice Extensor Digitorum Longus (EDL), Soleus (Sol), Quadriceps (Qua), Triceps and Diaphragm or Soleus (Sol), Quadriceps (Qua), Triceps and Diaphragm muscles.

[0036] As used herein, the term “central nervous system or CNS” refers to the brain, spinal cord, retina, optic nerve, and/or olfactory nerves and epithelium. As used herein, the term CNS cells refer to any cells of the CNS including neurons and glial cells (oligodendrocytes, astrocytes, ependymal cells, microglia).

[0037] As used herein “seroprevalence” refers to the human seroprevalence, which means the level of anti-AAV antibodies binding to an AAV capsid serotype present in a human population and expressed as seric antibodies or immunoglobulins. The seroprevalence of an AAV capsid is measured using a cohort of human sera and standard assays that are well known in the art and disclosed for example in (Meliani et al., Hum Gene Ther Methods. 2015 April; 26(2):45-53. doi: 10.1089/hgtb.2015.037). The assay may be an ELISA assay as disclosed in the examples of the present application. The seroprevalence of an AAV capsid serotype (or serotype) may be defined as the percentage of individuals having an ELISA titer of IgG specific for said serotype higher than 10 μg/mL. A low prevalent serotype may be defined as a serotype with less than around 30% of individuals that are seropositive, corresponding to a seroprevalence similar or lower to AAV8 capsid (SEQ ID NO: 1) seroprevalence which is considered as a reference of low-seroprevalence. A high-seroprevalent AAV capsid serotype refers to a AAV capsid serotype having a seroprevalence higher than 50%. A seroprevalence equivalent to the seroprevalence of the acceptor AAV capsid refers to a seroprevalence which is around 30%. Alternatively, the seroprevalence may be defined as the dilution at which a reduction of 50% of the OD signal is observed (OD50) using a dose-response curve. The OD50 of the tested AAV capsid is compared to that of a reference AAV capsid of known seroprevalence.

[0038] “a”, “an”, and “the” include plural referents, unless the context clearly indicates otherwise. As such, the term “a” (or “an”), “one or more” or “at least one” can be used interchangeably herein; unless specified otherwise, “or” means “and/or”.

[0039] The term “identity” refers to the sequence similarity between two polypeptide molecules or between two nucleic acid molecules. When a position in both compared sequences is occupied by the same base or same amino acid residue, then the respective molecules are identical at that position. The percentage of identity between two sequences corresponds to the number of matching positions shared by the two sequences divided by the number of positions compared and multiplied by 100. Generally, a comparison is made when two sequences are aligned to give maximum identity. The identity may be calculated by alignment using, for example, the GCG (Genetics Computer Group, Program Manual for the GCG Package, Version 7, Madison, Wis.) pileup program, or any of sequence comparison algorithms such as BLAST, FASTA or CLUSTALW.

[0040] The acceptor and donor AAV capsids may be from any different natural or artificial AAV serotypes. At least 13 different AAV serotypes (AAV1 to 13) have been identified in human and non-human primates and classified in various clades and clones based on phylogenetic analysis of VP1 sequences of various primate AAV isolates: AAV1 and AAV6 correspond to Clade A; AAV2 to Clade B; AAV2-AAV3 hybrid to Clade C; AAV7 to Clade D; AAV8 to Clade E; AAV9 to Clade F, whereas AAV3, AAV4 and AAV5 are disclosed as clones (Gao et al., J. Virol., 2004, 78, 6381-6388). AAV2 variant serotypes and AAV2/13 hybrid capsids have been isolated in human liver (La Bella et al., Gut, 2020, 69, 737-747.doi:10.1136/gutjnk-2019-318281; SEQ ID NO: 2 to 30 in the attached sequence listing). Other AAV serotypes have been identified in non-primate species, such as porcine, bovine, avian and caprine. Porcine AAV includes in particular AAVpo1, po2.1, po4 to 6. Various AAV capsid variants, also named “synthetic AAV serotypes” or new AAV serotypes” have been engineered, in particular by directed gene evolution or in silico discovery such as with no limitations recombinant AAV2-derived serotypes DJ, DJ8 and PHP.B which are hybrid capsids from 8 AAV serotypes (AAV2, 4, 5, 8, 9, avian, bovine and goat) AAV-Anc80, AAV2i8, AAV-LK03 and others.

[0041] In some embodiments, the acceptor AAV capsid protein is from an AAV serotype used in gene therapy, also named “conventional AAV serotype” such as for example AAV1, AAV2, AAV2 variants (such as the quadruple-mutant capsid optimized AAV2 comprising an engineered capsid with Y44+500+730F+T491V changes, disclosed in Ling et al., 2016 Jul. 18, Hum Gene Ther Methods.), AAV3 and AAV3 variants (such as the AAV3-ST variant comprising an engineered AAV3 capsid with two amino acid changes, S663V+T492V, disclosed in Vercauteren et al., 2016, Mol. Ther. Vol. 24(6), p. 1042), -3B and AAV-3B variants, AAV4, AAV5, AAV6 and AAV6 variants (such as the AAV6 variant comprising the triply mutated AAV6 capsid Y731F/Y705F/T492V form disclosed in Rosario et al., 2016, Mol Ther Methods Clin Dev. 3, p. 16026), AAV7, AAV8, AAV9, AAV 2G9, AAV10 such as AAVcyl0 and AAVrh10, AAVrh32.33, AAVrh39, AAVrh43, AAVrh74, AAV-DJ, AAVAnc80, AAV-LK03, AAV.PHP such as AAV-PHP.B, AAV-PHP.EB, AAV2i8, clade F AAVHSC such as AAVHSC7, AAVHSC15 and AAVHSC17, AAV9.rh74 and AAV9.rh74-P1 (WO 2019/193119), porcine AAV such as AAVpo1, AAVpo2.1, AAVpo4 and AAVpo6, and tyrosine, lysine and serine capsid mutants of AAV serotypes.

[0042] In particular embodiments, the acceptor AAV capsid protein is from an AAV serotype selected from the group consisting of: AAV4, AAV5, AAV7, AAV8, AAV9, AAVrh10, AAVrh32.33, AAVrh39, AAVrh43, AAVrh74, AAV9.rh74, AAV9.rh74-P1, AAV-DJ, AAVAnc80, AAV2i8, AAV-LK03, and AAV.PHP. AAV4 capsid (GenBank accession number NC_001829.1); AAV5 capsid (GenBank accession number NC_006152.1 accessed on 13 Aug. 2018); AAV7 capsid (GenBank accession number NC_006260.1); AAV9 capsid (GenBank accession number AY530579.1 accessed on 24 Jun. 2004); AAVrh10 capsid (GenBank accession number AY243015.1 accessed on 14 May 2003); AAV-LK03 (amino acid sequence SEQ ID NO: 166), AAVrh74 (amino acid sequence SEQ ID NO: 160; CDS of SEQ ID NO: 161) AAV9.rh74 (amino acid sequence SEQ ID NO: 162; CDS of SEQ ID NO: 163), AAV9.rh74-P1 (amino acid sequence SEQ ID NO: 164; CDS of SEQ ID NO: 165).

[0043] In particular embodiments, the donor AAV capsid protein(s) is from a newly-isolated natural AAV variant serotype such as for example AAV2/13 hybrid serotype, in particular isolated from human tissue such as liver tissue; more preferably selected from the group consisting of the sequences SEQ ID NO: 2 to 30. In some preferred embodiments, the donor AAV capsid protein(s) is selected from the group consisting of the sequences SEQ ID NO: 2 to 10, 18, 20-22, 29 and 30; still more preferably SEQ ID NO: 2, 10, 20, 21 and 30.

[0044] In particular embodiments, the donor AAV capsid protein(s) is from an AAV serotype used in gene therapy. The donor AAV capsid protein(s) may be AAV13. AAV13 capsid gene (coding sequence or CDS) sequence corresponds to positions 1948 to 4149 of AAV13 genome sequence GenBank accession number EU285562.1 as accessed on 23 September; AAV13 capsid protein (major coat protein or VP1) amino acid sequence corresponds to GenBank accession number ABZ10812.1 as accessed on 23 Sep. 2008 or SEQ ID NO: 202.

[0045] In some preferred embodiments, the acceptor AAV capsid serotype has a low seroprevalence and the donor AAV capsid serotype(s) has a higher seroprevalence than the acceptor AAV capsid serotype. Examples of acceptor AAV capsid serotype with a low seroprevalence include with no limitations: AAV8, AAV9, AAV5, AAV-LK03, AAVrh10, AAVrh74, AAV9.rh74, AAV9.rh74-P1. In some more preferred embodiments, the acceptor AAV capsid serotype is selected from the group consisting of: AAV8, AAV9, AAV5, AAV-LK03, AAVrh74, AAV9.rh74, AAV9.rh74-P1 and AAVrh10. In some preferred embodiments the donor AAV capsid serotype(s) is chosen from AAV13 and hybrid AAV2/13. In some more preferred embodiments, the donor AAV capsid serotype(s) is selected from the group consisting of AAV13, and the sequences SEQ ID NO: 2 to 30; preferably AAV13 and the sequences SEQ ID NO: 2 to 10, 18, 20-22, 29 and 30; still more preferably AAV13 and the sequences SEQ ID NO: 2, 10, 20, 21 and 30.

[0046] Step b) comprises the replacement of one to eleven (1, 2, 3, 4, 5, 6, 7, 8, 9, 10 or 11) HVR sequences of the acceptor capsid serotype chosen from HVR1, HVR2, HVR3, HVR4, HVR5, HVR6, HVR7, HVR8, HVR9, HVR10, and HVR12 with different HVR sequence(s) from the corresponding HVR(s) of the donor AAV capsid protein(s).

[0047] In some embodiments, the HVR sequence(s) of the donor AAV capsid protein (replacement HVR sequences) and/or acceptor AAV capsid protein(s) (replaced HVR sequences) are selected from the group consisting of an HVR1 sequence from positions 134 to 165, an HVR2 sequence from positions 176 to 192; an HVR3 sequence from positions 259 to 278; an HVR4 sequence from positions 379 to 395; an HVR5 sequence from positions 446 to 485; an HVR6 sequence from positions 485 to 502; an HVR7 sequence from positions 499 to 516; an HVR8 sequence from positions 509 to 531; an HVR9 sequence from positions 531 to 570; an HVR10 sequence from positions 576 to 613; and an HVR12 sequence from positions 687 to 738; preferably an HVR1 sequence from positions 134 to 165, an HVR2 sequence from positions 176 to 192; an HVR3 sequence from positions 259 to 278; an HVR4 sequence from positions 379 to 395; an HVR5 sequence from positions 446 to 484; an HVR6 sequence from positions 490 to 500; an HVR7 sequence from positions 501 to 512; an HVR8 sequence from positions 514 to 529; an HVR9 sequence from positions 531 to 570; an HVR10 sequence from positions 576 to 613; and an HVR12 sequence from positions 705 to 736; the indicated positions being determined by alignment with SEQ ID NO: 1 (VP1 of AAV8 or AAV8 capsid). HVR11 sequence which is not replaced in the method according to the invention corresponds to the sequence from positions 621 to 687; preferably the sequence from positions 630 to 682; the indicated positions being determined by alignment with SEQ ID NO: 1 (VP1 of AAV8 or AAV8 capsid). These positions correspond to a large definition of the HVR sequences.

[0048] In some embodiments, step b) comprises replacing less than 8 HVR sequences of the acceptor AAV capsid protein with different HVR sequence(s) from the corresponding HVR(s) of the donor AAV capsid protein(s), e.g., the recombinant hybrid AAV capsid protein comprises less than 8 HVR sequences from the donor AAV capsid protein(s). In some preferred embodiments, step b) comprises replacing up to 6 HVR sequences; preferably up to 4 HVR sequences, of the acceptor AAV capsid protein with different HVR sequence(s) from the corresponding HVR(s) of the donor AAV capsid protein(s), e.g., the recombinant hybrid AAV capsid protein comprises up to 6 HVR sequences, preferably up to 4 HVR sequences from the donor AAV capsid protein(s). In some preferred embodiments the acceptor AAV capsid serotype is selected from the group consisting of: AAV8, AAV9, AAV5, AAV-LK03, AAVrh74, AAV9.rh74, AAV9.rh74-P1, and AAVrh10 and/or the donor AAV capsid serotype(s) is selected from the group consisting of AAV13, and the sequences SEQ ID NO: 2 to 30. In some preferred embodiments, the HVR sequence(s) of the donor AAV capsid protein (replacement HVR sequences) and/or acceptor AAV capsid protein(s) (replaced HVR sequences) are selected from the group consisting of an HVR1 sequence from positions 134 to 165, an HVR2 sequence from positions 176 to 192; an HVR3 sequence from positions 259 to 278; an HVR4 sequence from positions 379 to 395; an HVR5 sequence from positions 446 to 485; an HVR6 sequence from positions 485 to 502; an HVR7 sequence from positions 499 to 516; an HVR8 sequence from positions 509 to 531; an HVR9 sequence from positions 531 to 570; an HVR10 sequence from positions 576 to 613; and an HVR12 sequence from positions 687 to 738; preferably an HVR1 sequence from positions 134 to 165, an HVR2 sequence from positions 176 to 192; an HVR3 sequence from positions 259 to 278; an HVR4 sequence from positions 379 to 395; an HVR5 sequence from positions 446 to 484; an HVR6 sequence from positions 490 to 500; an HVR7 sequence from positions 501 to 512; an HVR8 sequence from positions 514 to 529; an HVR9 sequence from positions 531 to 570; an HVR10 sequence from positions 576 to 613; and an HVR12 sequence from positions 705 to 736; the indicated positions being determined by alignment with SEQ ID NO: 1 (VP1 of AAV8 or AAV8 capsid). In some embodiments, step b) comprises replacing one or more or all of HVR5 to HVR10 sequences of the acceptor AAV capsid protein with different HVR sequence(s) from the corresponding HVR(s) of the donor AAV capsid protein(s), e.g., the recombinant hybrid AAV capsid protein comprises one or more or all of HVR5 to HVR10 sequences from the donor AAV capsid protein(s). In some preferred embodiments, step b) comprises replacing one or more or all of HVR5 to HVR8 sequences of the acceptor AAV capsid protein with different HVR sequence(s) from the corresponding HVR(s) of the donor AAV capsid protein(s), e.g., the recombinant hybrid AAV capsid protein comprises one or more or all of HVR5 to HVR8 sequences from the donor AAV capsid protein(s). In some more preferred embodiments, step b) comprises replacing at least HVR5 sequence of the acceptor AAV capsid protein with a different HVR5 sequence from the corresponding HVR of the donor AAV capsid protein(s). HVR5 may be replaced alone or with one or more or all of HVR6 to HVR10 of the acceptor AAV capsid protein. For example, step b) may comprise replacing HVR5, HVR5 to HVR8, HVR5 to HVR9 or HVR5 to HVR10. HVR5 is preferably replaced alone or with one or more or all of HVR6 to HVR8 of the acceptor AAV capsid protein. For example, step b) may comprise replacing HVR5 or HVR5 to HVR8. In some preferred embodiments the acceptor AAV capsid serotype is selected from the group consisting of: AAV8, AAV9, AAV5, AAV-LK03, AAVrh74, AAV9.rh74, AAV9.rh74-P1, and AAVrh10 and/or the donor AAV capsid serotype(s) is selected from the group consisting of AAV13, and the sequences SEQ ID NO: 2 to 30; preferably AAV13 and the sequences SEQ ID NO: 2 to 10, 18, 20-22, 29 and 30; still more preferably AAV13 and the sequences SEQ ID NO: 2, 10, 20, 21 and 30. In some preferred embodiments, the one or more HVR5 to HVR10 sequence(s) of the donor AAV capsid protein (replacement HVR sequences) and/or acceptor AAV capsid protein(s) (replaced HVR sequences) are selected from the group consisting of an HVR5 sequence from positions 446 to 485; an HVR6 sequence from positions 485 to 502; an HVR7 sequence from positions 499 to 516; an HVR8 sequence from positions 509 to 531; an HVR9 sequence from positions 531 to 570; and an HVR10 sequence from positions 576 to 613; more preferably an HVR5 sequence from positions 446 to 484; an HVR6 sequence from positions 490 to 500; an HVR7 sequence from positions 501 to 512; an HVR8 sequence from positions 514 to 529; an HVR9 sequence from positions 531 to 570; and an HVR10 sequence from positions 576 to 613; the indicated positions being determined by alignment with SEQ ID NO: 1 (VP1 of AAV8 or AAV8 capsid).

[0049] In some particular embodiments, step b) comprises replacing HVR5 to HVR8 sequences of the acceptor AAV capsid protein with HVR5 to HVR8 sequences of a donor AAV capsid serotype selected from AAV13 and any one of SEQ ID NO: 2 to 30; preferably AAV13, #704 (SEQ ID NO: 2); #1704 (SEQ ID NO: 10); #3086 (SEQ ID NO: 20); #1024 (SEQ ID NO: 22); #508 (SEQ ID NO: 9); #3142 (SEQ ID NO: 21); #2320 (SEQ ID NO: 29); #1010 (SEQ ID NO: 6); M258 (SEQ ID NO: 30); #1570 (SEQ ID NO: 18); #1602 (SEQ ID NO: 5); #667 (SEQ ID NO: 7); #129 (SEQ ID NO: 3); and #767 (SEQ ID NO: 8); still more preferably AAV13, #704 (SEQ ID NO: 2) and M258 (SEQ ID NO: 30); preferably wherein HVR5 sequence of the donor AAV capsid protein (replacement HVR5 sequence) and/or acceptor AAV capsid protein(s) (replaced HVR5 sequence) is from positions 446 to 485; HVR6 sequence is from positions 485 to 502; HVR7 sequence is from positions 499 to 516; and HVR8 sequence is from positions 509 to 531; more preferably wherein HVR5 is from positions 446 to 484; HVR6 sequence is from positions 490 to 500; HVR7 sequence is from positions 501 to 516; and HVR8 sequence is from positions 514 to 529; the indicated positions being determined by alignment with SEQ ID NO: 1 (VP1 of AAV8 or AAV8 capsid). In some preferred embodiments the acceptor AAV capsid serotype is selected from the group consisting of: AAV8, AAV9, AAV5, AAV-LK03, AAVrh74, AAV9.rh74, AAV9.rh74-P1 and AAVrh10.

[0050] In some embodiments, step b) comprises replacing any one of HVR1 to HVR10 and HVR12 of the acceptor AAV capsid protein with a different HVR sequence from the corresponding HVR of the donor AAV capsid protein, e.g., the recombinant hybrid AAV capsid protein comprises one HVR sequence from the donor AAV capsid protein. In some particular embodiments, step b) comprises replacing HVR5, HVR6, HVR7, or HVR8 of the acceptor AAV capsid with a different a different HVR sequence from the corresponding HVR from the donor AAV capsid protein, e.g., the recombinant hybrid AAV capsid protein comprises the HVR5, HVR6, HVR7 or HVR8 sequence from the donor AAV capsid protein. In some preferred embodiments, step b) comprises replacing any one of HVR1, HVR3, HVR5, HVR6, HVR7, HVR8, HVR9, HVR10 and HVR12; preferably one of HVR3, HVR5, HVR9, HVR10 or HVR12 of the acceptor AAV capsid with a different HVR sequence from the corresponding HVR from the donor AAV capsid protein. In some preferred embodiments, step b) comprises replacing HVR5, of the acceptor AAV capsid with a different a different HVR5 sequence from the donor AAV capsid protein, e.g., the recombinant hybrid AAV capsid protein comprises the HVR5 sequence from the donor AAV capsid protein. In some preferred embodiments the acceptor AAV capsid serotype is selected from the group consisting of: AAV8, AAV9, AAV-LK03, AAVrh74, AAV9.rh74, AAV9.rh74-P1, AAV5 and AAVrh10 and/or the donor AAV capsid serotype(s) is selected from the group consisting of AAV13, and the sequences SEQ ID NO: 2 to 30; preferably AAV13 and the sequences SEQ ID NO: 2 to 10, 18, 20-22, 29 and 30; still more preferably the sequences SEQ ID NO: 2, 10, 20, 21 and 30. In some other preferred embodiments, step b) comprises replacing any one of HVR1, HVR3, HVR6, HVR7, HVR8, HVR9, HVR10 and HVR12 of AAV8; preferably HVR3, HVR9, HVR10 or HVR12 of AAV8; with a different HVR sequence from the corresponding HVR from a donor AAV capsid protein selected from the group consisting of AAV13, and the sequences SEQ ID NO: 2 to 30; preferably SEQ ID NO: 2. In some preferred embodiments, the HVR sequence(s) of the donor AAV capsid protein (replacement HVR sequences) and/or acceptor AAV capsid protein(s) (replaced HVR sequences) are selected from the group consisting of an HVR1 sequence from positions 134 to 165, an HVR2 sequence from positions 176 to 192; an HVR3 sequence from positions 259 to 278; an HVR4 sequence from positions 379 to 395; an HVR5 sequence from positions 446 to 485; an HVR6 sequence from positions 485 to 502; an HVR7 sequence from positions 499 to 516; an HVR8 sequence from positions 509 to 531; an HVR9 sequence from positions 531 to 570; an HVR10 sequence from positions 576 to 613; and an HVR12 sequence from positions 687 to 738; still more preferably, an HVR1 sequence from positions 134 to 165, an HVR2 sequence from positions 176 to 192; an HVR3 sequence from positions 259 to 278; an HVR4 sequence from positions 379 to 395; an HVR5 sequence from positions 446 to 484; an HVR6 sequence from positions 490 to 500; an HVR7 sequence from positions 501 to 512; an HVR8 sequence from positions 514 to 529; an HVR9 sequence from positions 531 to 570; an HVR10 sequence from positions 576 to 613; and an HVR12 sequence from positions 705 to 736; the indicated positions being determined by alignment with SEQ ID NO: 1 (VP1 of AAV8 or AAV8 capsid).

[0051] In some particular embodiments, HVR5 is from a donor AAV capsid serotype selected from the group consisting of: AAV13; #704 (SEQ ID NO: 2); #1704 (SEQ ID NO: 10); #3086 (SEQ ID NO: 20); #508 (SEQ ID NO: 9); #3142 (SEQ ID NO: 21); #M258 (SEQ ID NO: 30); #1570 (SEQ ID NO: 18); #2731 (SEQ ID NO:4); #1602 (SEQ ID NO: 5); #667 (SEQ ID NO: 7); #129 (SEQ ID NO: 3); and #767 (SEQ ID NO: 8); preferably HVR5 is from an AAV capsid serotype selected from the group consisting of the sequences SEQ ID NO: 2, 10, 20, 21 and 30. The HVR5 sequence is advantageously from positions 446 to 485; preferably from positions 446 to 484; the indicated positions being determined by alignment with SEQ ID NO: 1 (VP1 of AAV8 or AAV8 capsid). In some preferred embodiments, HVR5 comprises a sequence selected from the group consisting of SEQ ID NO: 175 to 186; preferably SEQ ID NO: 175 to 179. In some preferred embodiments, the acceptor AAV capsid serotype is selected from the group consisting of: AAV8, AAV9, AAV5, AAV-LK03, AAVrh74, AAV9.rh74, AAV9.rh74-P1, and AAVrh10.

[0052] In some preferred embodiments, the hybrid AAV capsid protein has an increased tropism for muscles and/or the central nervous system compared to the acceptor AAV capsid protein or the acceptor and donor AAV capsid proteins. In some particular embodiments, the hybrid AAV capsid protein has an increased tropism for kidney compared to the acceptor AAV capsid protein or the acceptor and donor AAV capsid proteins. In some particular embodiments, the hybrid AAV capsid protein has an increased tropism for heart and/or skeletal muscles compared to the acceptor AAV capsid protein or the acceptor and donor AAV capsid proteins. The hybrid AAV capsid protein has advantageously an increased tropism for different skeletal muscle groups; in particular the hybrid AAV capsid protein has an increased tropism for at least two skeletal muscle groups in mice selected from the group consisting of: Extensor Digitorum Longus (EDL), Soleus (Sol), Quadriceps (Qua), Triceps and Diaphragm or Soleus (Sol), Quadriceps (Qua), Triceps and Diaphragm. In some particular embodiments, the hybrid AAV capsid protein has a decreased tropism for an off-target tissue, advantageously the liver.

[0053] In some preferred embodiments, the hybrid AAV capsid protein has a seroprevalence equivalent to the seroprevalence the acceptor AAV capsid protein. In some more preferred embodiments, the hybrid AAV capsid protein has an increased tropism for muscles and/or the central nervous system compared to the acceptor AAV capsid protein or the acceptor and donor AAV capsid proteins and a seroprevalence which is equivalent to the seroprevalence of the acceptor AAV capsid protein.

[0054] In some preferred embodiments, the acceptor AAV capsid serotype has a low seroprevalence, the donor AAV capsid serotype has a higher seroprevalence than the acceptor and the hybrid AAV capsid protein has a seroprevalence equivalent to the seroprevalence of the acceptor AAV capsid protein. In some more preferred embodiments, the hybrid AAV capsid protein has an increased tropism in muscles and/or the central nervous system compared to the acceptor AAV capsid protein or the acceptor and donor AAV capsid proteins.

[0055] In some preferred embodiments, the acceptor AAV capsid protein is from an AAV serotype selected from the group consisting of: AAV8 and AAV9, still more preferably AAV8.

[0056] In some embodiments, the hybrid AAV capsid protein is an hybrid between two AAV capsid serotypes, preferably between an acceptor AAV capsid serotype having a low seroprevalence and a donor AAV capsid serotype having a higher seroprevalence than the acceptor AAV capsid serotype.

[0057] In some other embodiments, the hybrid AAV capsid protein is an hybrid between more than two AAV capsid serotypes, preferably between an acceptor AAV capsid serotype having a low seroprevalence and donor AAV capsid serotypes having a higher seroprevalence than the acceptor AAV capsid serotype.

[0058] In some embodiments, the method further comprises the step (c) of assaying the tropism of the hybrid AAV capsid protein obtained in step (b) by comparison with at least its parent acceptor capsid protein and (d) of selecting an hybrid AAV capsid protein having improved tropism compared to at least its parent acceptor capsid protein. In some preferred embodiments, the method further comprises the step (e) of assaying the seroprevalence of the hybrid AAV capsid protein and (f) selecting an hybrid AAV capsid protein having a seroprevalence equivalent to the seroprevalence of the acceptor AAV capsid.

[0059] In some embodiments, the method further comprises the step of inserting a cell-targeting peptide in the hybrid AAV capsid protein obtained in step (b), in particular a peptide known not to alter the seroprevalence of the capsid. In some particular embodiments, the cell-targeting peptide comprises the RGD motif. The incorporation of the RGD sequence into the viral capsid can target the vector to integrins, which are widely expressed on several cell types (Michelfelder S. et al. PLoS One. 2009; 4(4): e5122). In particular, the insertion of the peptide RGDLGLS in the HVR10 of AAV capsid leads to enhanced muscles targeting without any impact on capsid seroprevalence (WO 2019/193119). In some preferred embodiments, the peptide is of up to 30 amino acids and comprises or consists of any one of: RGDLGLS (SEQ ID NO: 167), LRGDGLS (SEQ ID NO: 168), LGRGDLS (SEQ ID NO: 169), LGLRGDS (SEQ ID NO: 170), LGLSRGD (SEQ ID NO: 171) and RGDMSRE (SEQ ID NO: 172); preferably SEQ ID NO: 167. The sequences comprising the RGD motif may be flanked by up to five or more amino acids at their N- and/or C-terminal ends, such as for example by GQSG (SEQ ID NO: 173) and AQAA (SEQ ID NO: 174), respectively at the N- and C-terminal end of the peptide. One or more peptide(s) comprising the RGD motif may be inserted into a site exposed on the AAV capsid surface. Sites on the AAV capsid which are exposed on the capsid surface and tolerate peptide insertions, i.e. do not affect assembly and packaging of the virus capsid, are well-known in the art and include for example the AAV capsid surface loops or antigenic loops (Girod et al., Nat. Med., 1999, 5, 1052-1056; Grifman et al., Molecular Therapy, 2001, 3, 964-975); other sites are disclosed in Rabinowitz et al., Virology, 1999, 265, 274-285; Wu et al., J. Virol., 2000, 74, 8635-8647. In some particular embodiments, the cell-targeting peptide is inserted in an HVR, in particular HVR3, HVR4, HVR5 or HVR10; preferably HVR10. In particular, the peptide(s) comprising the RGD motif are inserted around any of positions 261, 383, 449, 575 or 590 according to the numbering in SEQ ID NO: 162 (AAV9.rh74), preferably around position 449 or 590, more preferably around position 590. The positions are indicated by reference to SEQ ID NO: 255; one skilled in the art will be able to find easily the corresponding positions in another sequence after alignment with SEQ ID NO: 162. The insertion site is advantageously from positions 587 to 592 or 588 to 593 according to the numbering in SEQ ID NO: 162, preferably from positions 587 to 592. The insertion of the peptide may or may not cause the deletion of some or all of the residue(s) from the insertion site. The peptide advantageously replaces all the residues from positions 587 to 592 or 588 to 593 of the AAV capsid protein according to the numbering in SEQ ID NO: 162, preferably all of the residues from positions 587 to 592.

[0060] In some embodiments, the method is a high throughput method, wherein step (a) and step (b) are performed simultaneously to prepare different hybrid AAV capsid proteins, for example different hybrid AAV capsid proteins derived from the same acceptor and/or donor AAV capsid proteins. The high throughput method may comprise additional steps (c)-(d) and/or (e)-(f) as defined above.

### Hybrid AAV Capsids

[0061] The invention also relates to a recombinant hybrid AAV capsid protein with improved tissue tropism obtained or obtainable by the method of the present disclosure.

[0062] The recombinant hybrid AAV capsid protein may be derived from any different natural or artificial AAV serotypes used as acceptor and donor AAV capsid serotypes such as in particular those described in the present disclosure. The recombinant hybrid AAV capsid protein which is an hybrid between an acceptor AAV capsid serotype and donor AAV capsid serotype(s) comprises one to eleven (1, 2, 3, 4, 5, 6, 7, 8, 9, 10 or 11) HVR sequences from the donor AAV capsid protein(s) chosen from HVR1, HVR2, HVR3, HVR4, HVR5, HVR6, HVR7, HVR8, HVR9, HVR10, and HVR12 (replacement HVR sequence(s)) replacing the corresponding HVR sequence(s) of the acceptor capsid serotype (replaced HVR sequence(s)); the replacement HVR sequence(s)) have by definition an amino acid sequence which is different from that of the replaced HVR sequence(s).

[0063] In some embodiments, the HVR sequence(s) of the donor AAV capsid protein (replacement HVR sequences) and/or acceptor AAV capsid protein(s) (replaced HVR sequences) are selected from the group consisting of an HVR1 sequence from positions 134 to 165, an HVR2 sequence from positions 176 to 192; an HVR3 sequence from positions 259 to 278; an HVR4 sequence from positions 379 to 395; an HVR5 sequence from positions 446 to 485; an HVR6 sequence from positions 485 to 502; an HVR7 sequence from positions 499 to 516; an HVR8 sequence from positions 509 to 531; an HVR9 sequence from positions 531 to 570; an HVR10 sequence from positions 576 to 613; and an HVR12 sequence from positions 687 to 738; preferably, an HVR1 sequence from positions 134 to 165, an HVR2 sequence from positions 176 to 192; an HVR3 sequence from positions 259 to 278; an HVR4 sequence from positions 379 to 395; an HVR5 sequence from positions 446 to 484; an HVR6 sequence from positions 490 to 500; an HVR7 sequence from positions 501 to 512; an HVR8 sequence from positions 514 to 529; an HVR9 sequence from positions 531 to 570; an HVR10 sequence from positions 576 to 613; and an HVR12 sequence from positions 705 to 736; the indicated positions being determined by alignment with SEQ ID NO: 1 (VP1 of AAV8 or AAV8 capsid).

[0064] In some preferred embodiments, the recombinant hybrid AAV capsid protein is an hybrid between an acceptor AAV capsid serotype having a low seroprevalence and a donor AAV capsid serotype(s) having a higher seroprevalence than the acceptor AAV capsid serotype. In some particular embodiments the acceptor AAV capsid serotype is selected from the group consisting of: AAV8, AAV9, AAV-LK03, AAVrh74, AAV9.rh74, AAV9.rh74-P1, AAV5 and AAVrh10, and/or the donor AAV capsid serotype(s) is selected from the group consisting of AAV13 and the sequences SEQ ID NO: 2 to 30; preferably AAV13 and the sequences SEQ ID NO: 2 to 10, 18, 20-22, 29 and 30; more preferably AAV13 and the sequences SEQ ID NO: 2, 10, 20, 21 and 30. In some preferred embodiments, the donor AAV capsid serotype is SEQ ID NO: 2.

[0065] In some embodiments, the recombinant hybrid AAV capsid protein comprises less than 8 HVR sequences from the donor AAV capsid protein(s). In some preferred embodiments, the recombinant hybrid AAV capsid protein comprises up to 6; preferably up to 4 HVR sequences from the donor AAV capsid protein(s).). In some preferred embodiments the acceptor AAV capsid serotype is selected from the group consisting of: AAV8, AAV9, AAV-LK03, AAVrh74, AAV9.rh74, AAV9.rh74-P1, AAV5 and AAVrh10 and/or the donor AAV capsid serotype(s) is selected from the group consisting of AAV13 and the sequences SEQ ID NO: 2 to 30; preferably AAV13 and the sequences SEQ ID NO: 2 to 10, 18, 20-22, 29 and 30; more preferably AAV13 and the sequences SEQ ID NO: 2, 10, 20, 21 and 30. In some preferred embodiments, the HVR sequence(s) of the donor AAV capsid protein (replacement HVR sequences) and/or acceptor AAV capsid protein(s) (replaced HVR sequences) are selected from the group consisting of an HVR1 sequence from positions 134 to 165, an HVR2 sequence from positions 176 to 192; an HVR3 sequence from positions 259 to 278; an HVR4 sequence from positions 379 to 395; an HVR5 sequence from positions 446 to 485; an HVR6 sequence from positions 485 to 502; an HVR7 sequence from positions 499 to 516; an HVR8 sequence from positions 509 to 531; an HVR9 sequence from positions 531 to 570; an HVR10 sequence from positions 576 to 613; and an HVR12 sequence from positions 687 to 738; preferably an HVR1 sequence from positions 134 to 165, an HVR2 sequence from positions 176 to 192; an HVR3 sequence from positions 259 to 278; an HVR4 sequence from positions 379 to 395; an HVR5 sequence from positions 446 to 484; an HVR6 sequence from positions 490 to 500; an HVR7 sequence from positions 501 to 512; an HVR8 sequence from positions 514 to 529; an HVR9 sequence from positions 531 to 570; an HVR10 sequence from positions 576 to 613; and an HVR12 sequence from positions 705 to 736; the indicated positions being determined by alignment with SEQ ID NO: 1 (VP1 of AAV8 or AAV8 capsid).

[0066] In some embodiments, the recombinant hybrid AAV capsid protein comprises one or more of HVR5 to HVR10 sequences from the donor AAV capsid protein(s). In some preferred embodiments, the recombinant hybrid AAV capsid protein comprises one or more of HVR5 to HVR8 sequences from the donor AAV capsid protein(s). In some preferred embodiments, the recombinant hybrid AAV capsid protein comprises at least HVR5 sequence from the donor AAV capsid protein. The recombinant hybrid AAV capsid protein may comprise HVR5 alone or in combination with one or more or all of HVR6 to HVR10 from the donor capsid serotype; preferably HVR5 alone or in combination with one or more or all of HVR6 to HVR8 from the donor capsid serotype. In some preferred embodiments the acceptor AAV capsid serotype is selected from the group consisting of: AAV8, AAV9, AAV5, AAV-LK03, AAVrh74, AAV9.rh74, AAV9.rh74-P1 and AAVrh10 and/or the donor AAV capsid serotype(s) is selected from the group consisting of AAV13 and the sequences SEQ ID NO: 2 to 30; preferably AAV13 and the sequences SEQ ID NO: 2 to 10, 18, 20-22, 29 and 30; more preferably AAV13 and the sequences SEQ ID NO: 2, 10, 20, 21 and 30. In some preferred embodiments, the one or more HVR5 to HVR10 sequence(s) of the donor AAV capsid protein (replacement HVR sequences) and/or acceptor AAV capsid protein(s) (replaced HVR sequences) are selected from the group consisting of an HVR5 sequence from positions 446 to 485; an HVR6 sequence from positions 485 to 502; an HVR7 sequence from positions 499 to 516; an HVR8 sequence from positions 509 to 531; an HVR9 sequence from positions 531 to 570; an HVR10 sequence from positions 576 to 613; more preferably an HVR5 sequence from positions 446 to 484; an HVR6 sequence from positions 490 to 500; an HVR7 sequence from positions 501 to 512; an HVR8 sequence from positions 514 to 529; an HVR9 sequence from positions 531 to 570; and an HVR10 sequence from positions 576 to 613; more preferably an HVR5 sequence from positions 446 to 484; an HVR6 sequence from positions 490 to 500; an HVR7 sequence from positions 501 to 516; and an HVR8 sequence from positions 514 to 529; the indicated positions being determined by alignment with SEQ ID NO: 1 (VP1 of AAV8 or AAV8 capsid). In some preferred embodiments, the recombinant hybrid AAV capsid protein comprises or consists of a sequence selected from the group consisting of the sequences SEQ ID NO: 33 to 36, 47 to 58 and 60 to 73; preferably SEQ ID NO: 35, 36, 47, 48, 50, 51, 58, 67 and 73; and the sequences having at least 85%, 90%, 95%, 97%, 98% or 99% identity with said sequences; more preferably wherein the amino acid sequence variant has no mutations in at least the HVR sequences from the donor AAV capsid protein or all the HVR sequences.

[0067] In some particular embodiments, the recombinant hybrid AAV capsid protein comprises HVR5 to HVR8 sequences of an AAV serotype (donor AAV capsid serotype) selected from the group consisting of: AAV13, and any one of SEQ ID NO: 2 to 30; preferably AAV13, #704 (SEQ ID NO: 2); #1704 (SEQ ID NO: 10); #3086 (SEQ ID NO: 20); #1024 (SEQ ID NO: 22); #508 (SEQ ID NO: 9); #3142 (SEQ ID NO: 21); #2320 (SEQ ID NO: 29); #1010 (SEQ ID NO: 6); M258 (SEQ ID NO: 30); #1570 (SEQ ID NO: 18); #1602 (SEQ ID NO: 5); #667 (SEQ ID NO: 7); #129 (SEQ ID NO: 3); and #767 (SEQ ID NO: 8); still more preferably AAV13, #704 (SEQ ID NO: 2) and M258 (SEQ ID NO: 30). Preferably, wherein HVR5 sequence of the donor AAV capsid protein (replacement HVR5 sequence) and/or acceptor AAV capsid protein(s) (replaced HVR5 sequence) is from positions 446 to 485; HVR6 sequence is from positions 485 to 502; HVR7 sequence is from positions 499 to 516; and HVR8 sequence is from positions 509 to 531; still more preferably HVR5 sequence is from positions 446 to 484; HVR6 sequence is from positions 490 to 500; HVR7 sequence is from positions 501 to 512; and HVR8 sequence is from positions 514 to 529; the indicated positions being determined by alignment with SEQ ID NO: 1 (VP1 of AAV8 or AAV8 capsid). In some preferred embodiments the acceptor AAV capsid serotype is selected from the group consisting of: AAV8, AAV9, AAV-LK03, AAVrh74, AAV9.rh74, AAV9.rh74-P1, AAV5 and AAVrh10. In some preferred embodiments, the recombinant hybrid AAV capsid protein comprises or consists of a sequence selected from the group consisting of the sequences SEQ ID NO: 35, 58, 60 to 72; preferably SEQ ID NO: 35, 58, 67; and the sequences having at least 85%, 90%, 95%, 97%, 98% or 99% identity with said sequences; more preferably wherein the amino acid sequence variant has no mutations in at least the HVR sequences from the donor AAV capsid protein or all the HVR sequences.

[0068] In some embodiments, the recombinant hybrid AAV capsid protein comprises one HVR sequence (HVR1, HVR2, HVR3, HVR4, HVR5, HVR6, HVR7, HVR8, HVR9, HVR10, or HVR12 from the donor AAV capsid protein. In some particular embodiments, the recombinant hybrid AAV capsid protein comprises one of the HVR5, HVR6, HVR7 or HVR8 sequence from the donor AAV capsid protein. In some preferred embodiments the recombinant hybrid AAV capsid protein comprises the HVR5 sequence from the donor AAV capsid protein. In some preferred embodiments the acceptor AAV capsid serotype is selected from the group consisting of: AAV8, AAV9, AAV5, AAV-LK03, AAVrh74, AAV9.rh74, AAV9.rh74-P1 and AAVrh10 and/or the donor AAV capsid serotype(s) is selected from the group consisting of AAV13 and the sequences SEQ ID NO: 2 to 30; preferably AAV13 and the sequences SEQ ID NO: 2 to 10, 18, 20-22, 29 and 30; still more preferably the sequences SEQ ID NO: 2, 10, 20, 21 and 30. In some other preferred embodiments, the recombinant hybrid AAV capsid protein is from AAV8 acceptor capsid and comprises one of the HVR1, HVR3, HVR6, HVR7, HVR8, HVR9, HVR10 or HVR12 sequence from a donor AAV capsid serotype selected from the group consisting of AAV13, and the sequences SEQ ID NO: 2 to 30; preferably SEQ ID NO: 2; still more preferably, the recombinant hybrid AAV capsid protein is from AAV8 acceptor capsid and comprises HVR3, HVR9, HVR10 or HVR12 sequence from a from a donor AAV capsid serotype selected from the group consisting of AAV13, and the sequences SEQ ID NO: 2 to 30; preferably SEQ ID NO: 2. In some preferred embodiments, the HVR sequence(s) of the donor AAV capsid protein (replacement HVR sequences) and acceptor AAV capsid protein(s) (replaced HVR sequences) are selected from the group consisting of an HVR1 sequence from positions 134 to 165, an HVR2 sequence from positions 176 to 192; an HVR3 sequence from positions 259 to 278; an HVR4 sequence from positions 379 to 395; an HVR5 sequence from positions 446 to 485; an HVR6 sequence from positions 485 to 502; an HVR7 sequence from positions 499 to 516; an HVR8 sequence from positions 509 to 531; an HVR9 sequence from positions 531 to 570; an HVR10 sequence from positions 576 to 613; and an HVR12 sequence from positions 687 to 738; preferably an HVR1 sequence from positions 134 to 165, an HVR2 sequence from positions 176 to 192; an HVR3 sequence from positions 259 to 278; an HVR4 sequence from positions 379 to 395; an HVR5 sequence from positions 446 to 484; an HVR6 sequence from positions 490 to 500; an HVR7 sequence from positions 501 to 512; an HVR8 sequence from positions 514 to 529; an HVR9 sequence from positions 531 to 570; an HVR10 sequence from positions 576 to 613; and an HVR12 sequence from positions 705 to 736; the indicated positions being determined by alignment with SEQ ID NO: 1 (VP1 of AAV8 or AAV8 capsid). In some preferred embodiments, the recombinant hybrid AAV capsid protein comprises or consists of a sequence selected from the group consisting of the sequences SEQ ID NO: 36 to 43, 45, 47 to 57, 73; preferably SEQ ID NO: 36, 38, 42, 43, 45, 47, 48, 50, 51, 73, and the sequences having at least 85%, 90%, 95%, 97%, 98% or 99% identity with said sequences; more preferably wherein the amino acid sequence variant has no mutations in at least the HVR sequences from the donor AAV capsid protein or all the HVR sequences.

[0069] In some particular embodiments HVR5 is from an AAV capsid serotype selected from the group consisting of: #704 (SEQ ID NO: 2); #1704 (SEQ ID NO: 10); #3086 (SEQ ID NO: 20); #508 (SEQ ID NO: 9); #3142 (SEQ ID NO: 21); #M258 (SEQ ID NO: 30); #1570 (SEQ ID NO: 18); #2731 (SEQ ID NO: 4); #1602 (SEQ ID NO: 5); #667 (SEQ ID NO: 7); #129 (SEQ ID NO: 3); and #767 (SEQ ID NO:8).

[0070] The HVR5 sequence of the donor AAV capsid protein (replacement HVR5 sequence) and/or acceptor AAV capsid protein(s) (replaced HVR5 sequence) is advantageously from positions 446 to 485; preferably from positions 446 to 484; the indicated positions being determined by alignment with SEQ ID NO: 1 (VP1 of AAV8 or AAV8 capsid). In some preferred embodiments, HVR5 comprises a sequence selected from the group consisting of SEQ ID NO: 175 to 186; preferably SEQ ID NO: 175 to 179. In some preferred embodiments the acceptor AAV capsid serotype is selected from the group consisting of: AAV8, AAV9, AAV5 AAV-LK03, AAVrh74, AAV9.rh74, AAV9.rh74-P1, and AAVrh10. In some preferred embodiments, the recombinant hybrid AAV capsid protein comprises or consists of a sequence selected from the group consisting of the sequences SEQ ID NO: 36, 47 to 57, 73; preferably SEQ ID NO: 36, 47, 48, 50, 51, 73; 3 and the sequences having at least 85%, 90%, 95%, 97%, 98% or 99% identity with said sequences; more preferably wherein the amino acid sequence variant has no mutations in at least the HVR sequences from the donor AAV capsid protein or all the HVR sequences.

[0071] In some preferred embodiments, the acceptor AAV capsid protein is from an AAV serotype selected from the group consisting of: AAV8 and AAV9, still more preferably AAV8.

[0072] In some embodiments, the hybrid AAV capsid protein is an hybrid between two AAV capsid serotypes, preferably between an acceptor AAV capsid serotype having a low seroprevalence and a donor AAV capsid serotype having a higher seroprevalence than the acceptor AAV capsid serotype.

[0073] In some other embodiments, the hybrid AAV capsid protein is an hybrid between more than two AAV capsid serotypes, preferably between an acceptor AAV capsid serotype having a low seroprevalence and donor AAV capsid serotypes having a higher seroprevalence than the acceptor AAV capsid serotype.

[0074] In some preferred embodiments, the hybrid AAV capsid protein has an increased tropism for muscle and/or central nervous system compared to the acceptor AAV capsid protein or the acceptor and donor AAV capsid proteins. In some particular embodiments, the hybrid AAV capsid protein has an increased tropism for kidney compared to the acceptor AAV capsid protein or the acceptor and donor AAV capsid proteins. In some particular embodiments, the hybrid AAV capsid protein has an increased tropism for heart and/or skeletal muscles. The hybrid AAV capsid protein has advantageously an increased tropism for different skeletal muscle groups; in particular the hybrid AAV capsid protein has an increased tropism for at least two skeletal muscle groups in mice selected from the group consisting of: Extensor Digitorum Longus (EDL), Soleus (Sol), Quadriceps (Qua), Triceps and Diaphragm or Soleus (Sol), Quadriceps (Qua), Triceps and Diaphragm. In some particular embodiments, the hybrid AAV capsid protein has a decreased tropism for an off-target tissue, advantageously the liver. In particular embodiments, the hybrid AAV capsid protein having an increased tropism for muscle and/or central nervous system compared to the acceptor and donor AAV capsid proteins comprises or consists of a sequence selected from the group consisting of the sequences SEQ ID NO: 33 to 43, 45, 47 to 58, 60 to 73; preferably SEQ ID NO: 33 to 36, 38, 42, 43, 45, 47, 48, 50, 51, 58, 67, 73; 33 to 36 and the sequences having at least 85%, 90%, 95%, 97%, 98% or 99% identity with said sequences; more preferably wherein the amino acid sequence variant has no mutations in at least the HVR sequences from the donor AAV capsid protein or all the HVR sequences.

[0075] In some preferred embodiments, the hybrid AAV capsid protein has a seroprevalence equivalent to the seroprevalence of the acceptor AAV capsid protein. In some more preferred embodiments, the hybrid AAV capsid protein is derived from an acceptor AAV capsid of low seroprevalence and a donor AAV capsid protein of a higher seroprevalence than the acceptor AAV capsid. In some more preferred embodiments, the hybrid AAV capsid protein has an increased tropism for muscle and/or central nervous system compared to the acceptor AAV capsid protein or the acceptor and donor AAV capsid proteins and a seroprevalence equivalent to the seroprevalence of the acceptor AAV capsid protein. In particular embodiments, the hybrid AAV capsid protein having an increased tropism for muscle and/or central nervous system compared to the acceptor AAV capsid protein or the acceptor and donor AAV capsid proteins and a seroprevalence equivalent to the seroprevalence of the acceptor AAV capsid protein comprises or consists of a sequence selected from the group consisting of the sequences SEQ ID NO: 35 to 43, 45, 47 to 58, 60 to 73; preferably SEQ ID NO: 35, 36, 38, 42, 43, 45, 47, 48, 50, 51, 58, 67, 73; and the sequences having at least 85%, 90%, 95%, 97%, 98% or 99% identity with said sequences; more preferably wherein the amino acid sequence variant has no mutations in at least the HVR sequences from the donor AAV capsid protein or all the HVR sequences.

### Polynucleotide, Vector, and Use for AAV Vector Production

[0076] Another aspect of the invention is a polynucleotide encoding the recombinant hybrid AAV capsid protein in expressible form. The polynucleotide may be DNA, RNA or a synthetic or semi-synthetic nucleic acid.

[0077] In some embodiments, the polynucleotide encodes a recombinant hybrid AAV capsid protein having a sequence selected from the group consisting of the sequences SEQ ID NO: 33 to 43, 45, 47 to 58, 60 to 73; preferably SEQ ID NO: 35, 36, 38, 42, 43, 45, 47, 48, 50, 51, 58, 67, 73; and the sequences having at least 85%, 90%, 95%, 97%, 98% or 99% identity with said sequences; more preferably wherein the amino acid sequence variant has no mutations in at least the HVR sequences from the donor AAV capsid protein or all the HVR sequences.

[0078] In some preferred embodiments, the polynucleotide comprises or consists of a sequence selected from the group consisting of the sequences SEQ ID NO: 78, 80, 82, 84, 86, 88, 90, 92, 94, 96, 98, 102, 106, 108, 110, 112, 114, 116, 118, 120, 122, 124, 126, 128, 132, 134, 136, 138, 140, 142, 144, 146, 148, 150, 152, 154, 156, 158; preferably 82, 84, 88, 96, 98, 102, 106, 108, 112, 114, 128, 146, 158, and the sequences having at least 80%, 85%, 90%, 95%, 97%, 98% or 99% identity with said sequences. The polynucleotide is a functional polynucleotide sequence, which means that the sequence of the polynucleotide codes for the recombinant hybrid AAV capsid protein.

[0079] In some embodiments, the polynucleotide further encodes AAV Replicase (Rep) protein in expressible form, preferably Rep from AAV2.

[0080] The polynucleotide is advantageously inserted into a recombinant vector, which includes, in a non-limiting manner, linear or circular DNA or RNA molecules consisting of chromosomal, non-chromosomal, synthetic or semi-synthetic nucleic acids, such as in particular viral vectors, plasmid or RNA vectors. Numerous vectors into which a nucleic acid molecule of interest can be inserted in order to introduce it into and maintain it in a eukaryotic host cell are known per se; the choice of an appropriate vector depends on the use envisioned for this vector (for example, replication of the sequence of interest, expression of this sequence, maintaining of this sequence in extrachromosomal form, or else integration into the chromosomal material of the host), and also on the nature of the host cell.

[0081] In some embodiments, the vector is a plasmid.

[0082] The recombinant vector for use in the present invention is an expression vector comprising appropriate means for expression of the hybrid AAV capsid protein, and preferably also AAV Rep protein. Usually, each coding sequence (hybrid AAV Cap and AAV Rep) is inserted in a separate expression cassette either in the same vector or separately. Each expression cassette comprises the coding sequence (open reading frame or ORF) functionally linked to the regulatory sequences which allow the expression of the corresponding protein in AAV producer cells, such as in particular promoter, promoter/enhancer, intron, initiation codon (ATG), stop codon, transcription termination signal. Alternatively, the hybrid AAV Cap and the AAV Rep proteins may be expressed from a unique expression cassette using an Internal Ribosome Entry Site (IRES) inserted between the two coding sequences or a viral 2A peptide. In addition, the codon sequences encoding the hybrid AAV Cap, and AAV Rep if present, are advantageously optimized for expression in AAV producer cells, in particular human producer cells.

[0083] Another aspect of the invention is a cell stably transformed with a recombinant vector for expression of the hybrid AAV capsid protein, and preferably also AAV Rep protein. The cell stably expresses the hybrid AAV capsid and AAV Rep proteins (producer cell line). The producer cell is advantageously a human cell.

[0084] The vector, preferably a recombinant plasmid, and the producer cell line are useful for producing hybrid AAV vectors comprising the hybrid AAV capsid protein of the invention, using standard AAV production methods that are well-known in the art (Review in Aponte-Ubillus et al., Applied Microbiology and Biotechnology, 2018, 102: 1045-1054).

[0085] Briefly, following co-transfection of the producer cell line stably expressing the hybrid AAV capsid and AAV Rep proteins with plasmid containing recombinant AAV vector genome comprising the gene of interest inserted in an expression cassette, flanked by AAV ITRs, in the presence of sufficient helper function to permit packaging of the rAAV vector genome into AAV capsid particle, the cells are incubated for a time sufficient to allow the production of AAV vector particles, the cells are then harvested, lysed, and AAV vector particles are purified by standard purification methods such as affinity chromatography or Iodixanol or Cesium Chloride density gradient ultracentrifugation.

### AAV Particle, Cell

[0086] Another aspect of the invention is an AAV particle comprising the hybrid recombinant AAV capsid protein of the invention. Preferably, the AAV particle is a recombinant AAV (rAAV) vector particle, also named hybrid capsid serotype rAAV vector particle or hybrid serotype rAAV vector particle. The AAV vector particle is suitable for gene therapy directed to a target tissue or cells in the individual, in particular muscle, and/or CNS cells or tissue or other cells or tissues. The rAAV vector particle is packaging a gene of interest. The genome of the rAAV vector may either be a single-stranded or self-complementary double-stranded genome (McCarty et al, Gene Therapy, 2003, December, 10(26), 2112-2118). Self-complementary vectors are generated by deleting the terminal resolution site (trs) from one of the AAV terminal repeats. These modified vectors, whose replicating genome is half the length of the wild-type AAV genome have the tendency to package DNA dimers. The AAV genome is flanked by ITRs. In particular embodiments, the AAV vector is a pseudotyped vector, i.e. its genome and capsid are derived from AAVs of different serotypes. In some preferred embodiments, the genome of the pseudotyped vector is derived from AAV2. The rAAV vector particle may be obtained using the method of producing recombinant AAV vector particles of the invention.

[0087] By “gene of interest”, it is meant a gene useful for a particular application, such as with no limitation, diagnosis, reporting, modifying, therapy and genome editing.

[0088] For example, the gene of interest may be a therapeutic gene, a reporter gene or a genome-editing enzyme.

[0089] By “gene of interest for therapy”, “gene of therapeutic interest”, or “heterologous gene of interest”, it is meant a therapeutic gene or a gene encoding a therapeutic protein, peptide or RNA.

[0090] The gene of interest is any nucleic acid sequence capable of modifying a target gene or target cellular pathway, in cells of target organs, in particular muscle and/or CNS, or other target organs of interest. For example, the gene may modify the expression, sequence or regulation of the target gene or cellular pathway. In some embodiments, the gene of interest is a functional version of a gene or a fragment thereof. The functional version of said gene includes the wild-type gene, a variant gene such as variants belonging to the same family and others, or a truncated version, which preserves the functionality of the encoded protein at least partially. A functional version of a gene is useful for replacement or additive gene therapy to replace a gene, which is deficient or non-functional in a patient. In other embodiments, the gene of interest is a gene which inactivates a dominant allele causing an autosomal dominant genetic disease. A fragment of a gene is useful as recombination template for use in combination with a genome editing enzyme.

[0091] Alternatively, the gene of interest may encode a protein of interest for a particular application, (for example an antibody or antibody fragment, a genome-editing enzyme) or a RNA. In some embodiments, the protein is a therapeutic protein including a therapeutic antibody or antibody fragment, or a genome-editing enzyme. In some embodiments, the RNA is a therapeutic RNA.

[0092] In some embodiments, the sequence of the gene of interest is optimized for expression in the treated individual, preferably a human individual. Sequence optimization may include a number of changes in a nucleic acid sequence, including codon optimization, increase of GC content, decrease of the number of CpG islands, decrease of the number of alternative open reading frames (ARFs) and/or decrease of the number of splice donor and splice acceptor sites.

[0093] The gene of interest is a functional gene able to produce the encoded protein, peptide or RNA in the target cells of the disease, in particular muscle cells and/or cells of the CNS or other target cells of interest. In some embodiments, the gene of interest is a human gene. The AAV viral vector comprises the gene of interest in a form expressible in cells of target organs, in particular muscle cells, including cardiac and skeletal muscle cells muscles, and/or cells of the CNS or other target cell of interest. In particular, the gene of interest is operably linked to appropriate regulatory sequences for expression of a transgene in the individual's target cells, tissue(s) or organ(s). Such sequences which are well-known in the art include in particular a promoter, and further regulatory sequences capable of further controlling the expression of a transgene, such as without limitation, enhancer, terminator, intron, silencer, in particular tissue-specific silencer, and microRNA. The gene of interest is operably linked to a ubiquitous, tissue-specific or inducible promoter which is functional in cells of target organs, in particular muscle and/or CNS. The gene of interest may be inserted in an expression cassette further comprising additional regulatory sequences as disclosed above.

[0094] Examples of ubiquitous promoters include the CAG promoter, phosphoglycerate kinase 1 (PGK) promoter, the cytomegalovirus enhancer/promoter (CMV), the SV40 early promoter, the retroviral Rous sarcoma virus (RSV) LTR promoter, the dihydrofolate reductase promoter, the β-actin promoter, and the EF1 promoter. Muscle-specific promoters include without limitation, the desmin (Des) promoter, muscle creatine kinase (MCK) promoter, CK6 promoter, alpha-myosin heavy chain (alpha-MHC) promoter, myosin light chain 2 (MLC-2) promoter, cardiac troponin C (cTnC) promoter, synthetic muscle-specific SpC5-12 promoter, the human skeletal actin (HSA) promoter. Promoters for CNS expression include promoters driving ubiquitous expression and promoters driving expression into neurons. Representative promoters driving ubiquitous expression include, without limitation: CAG promoter (includes the cytomegalovirus enhancer/chicken beta actin promoter, the first exon and the first intron of the chicken beta-actin gene and the splice acceptor of the rabbit beta-globin gene); PGK (phosphoglycerate kinase 1) promoter; β-actin promoter; EF1a promoter; CMV promoter. Representative promoters driving expression into neurons include, without limitation, the promoter of the Calcitonin Gene-Related Peptide (CGRP), a known motor neuron-derived factor. Other neuron-selective promoters include the promoters of Choline Acetyl Transferase (ChAT), Neuron Specific Enolase (NSE), Synapsin, Hb9 and ubiquitous promoters including Neuron-Restrictive Silencer Elements (NRSE). Representative promoters driving selective expression in glial cells include the promoter of the Glial Fibrillary Acidic Protein gene (GFAP).

[0095] The RNA is advantageously complementary to a target DNA or RNA sequence or binds to a target protein. For example, the RNA is an interfering RNA such as a shRNA, a microRNA, a guide RNA (gRNA) for use in combination with a Cas enzyme or similar enzyme for genome editing, an antisense RNA capable of exon skipping such as a modified small nuclear RNA (snRNA) or a long non-coding RNA. The interfering RNA or microRNA may be used to regulate the expression of a target gene involved in muscle disease. The guide RNA in complex with a Cas enzyme or similar enzyme for genome editing may be used to modify the sequence of a target gene, in particular to correct the sequence of a mutated/deficient gene or to modify the expression of a target gene involved in a disease, in particular a neuromuscular disease. The antisense RNA capable of exon skipping is used in particular to correct a reading frame and restore expression of a deficient gene having a disrupted reading frame. In some embodiments, the RNA is a therapeutic RNA.

[0096] The genome-editing enzyme according to the invention is any enzyme or enzyme complex capable of modifying a target gene or target cellular pathway, in particular in muscle cells. For example, the genome-editing enzyme may modify the expression, sequence or regulation of the target gene or cellular pathway. The genome-editing enzyme is advantageously an engineered nuclease, such as with no limitations, a meganuclease, zinc finger nuclease (ZFN), transcription activator-like effector-based nuclease (TALENs), Cas enzyme from clustered regularly interspaced palindromic repeats (CRISPR)-Cas system and similar enzymes. The genome-editing enzyme, in particular an engineered nuclease such as Cas enzyme and similar enzymes, may be a functional nuclease which generates a double-strand break (DSB) or single-stranded DNA break (nickase such as Cas9(D10A) in the target genomic locus and is used for site-specific genome editing applications, including with no limitations: gene correction, gene replacement, gene knock-in, gene knock-out, mutagenesis, chromosome translocation, chromosome deletion, and the like. For site-specific genome editing applications, the genome-editing enzyme, in particular an engineered nuclease such as Cas enzyme and similar enzymes may be used in combination with a homologous recombination (HR) matrix or template (also named DNA donor template) which modifies the target genomic locus by double-strand break (DSB)-induced homologous recombination. In particular, the HR template may introduce a transgene of interest into the target genomic locus or repair a mutation in the target genomic locus, preferably in an abnormal or deficient gene causing a a muscle or central nervous system (CNS) disorder, such as for example a neuromuscular disease. Alternatively, the genome-editing enzyme, such as Cas enzyme and similar enzymes may be engineered to become nuclease-deficient and used as DNA-binding protein for various genome engineering applications such as with no limitation: transcriptional activation, transcriptional repression, epigenome modification, genome imaging, DNA or RNA pull-down and the like.

[0097] The invention also relates to an isolated cell, in particular a cell from an individual, which is stably transduced with a rAAV vector particle of the invention. The individual is advantageously a patient to be treated. In some embodiments, the cell is a muscle and/or CNS cell according to the present disclosure a progenitor of said cell or a pluripotent stem cell such as induced pluripotent stem cell (iPS cell), embryonic stem cells, fetal stem cell and adult stem cell.

### Pharmaceutical Composition and Therapeutic Uses

[0098] Another aspect of the invention is a pharmaceutical composition comprising at least an active agent selected from an AAV vector particle or a cell of the invention, and a pharmaceutically acceptable carrier.

[0099] The nucleic rAAV vector particle, cell and derived pharmaceutical composition of the invention may be used for treating diseases by gene therapy, in particular targeted gene therapy directed to muscle and/or CNS cells or tissue. The cell and derived pharmaceutical composition of the invention may be used for treating diseases by cell therapy, in particular cell therapy directed to muscle and/or CNS cell or other target cells of interest.

[0100] As used herein “Gene therapy” refers to a treatment of an individual which involves delivery of nucleic acid of interest into an individual's cells for the purpose of treating a disease. Delivery of the nucleic acid is generally achieved using a delivery vehicle, also known as a vector. The rAAV vector particle of the invention may be employed to deliver a gene to a patient's cells.

[0101] As used herein “Cell therapy” refers to a process wherein cells stably transduced by a rAAV vector particle of the invention are delivered to the individual in need thereof by any appropriate mean such as for example by intravenous injection (infusion), or injection in the tissue of interest (implantation or transplantation). In particular embodiments, cell therapy comprises collecting cells from the individual, transducing the individual's cells with the rAAV vector particle of the invention, and administering the stably transduced cells back to the patient. As used herein “cell” refers to isolated cell, natural or artificial cellular aggregate, bioartificial cellular scaffold and bioartificial organ or tissue.

[0102] Gene therapy can be performed by gene transfer, gene editing, exon skipping, RNA-interference, trans-splicing or any other genetic modification of any coding or regulatory sequences in the cell, including those included in the nucleus, mitochondria or as commensal nucleic acid such as with no limitation viral sequences contained in cells.

[0103] The two main types of gene therapy are the following:
[0104] a therapy aiming to provide a functional replacement gene for a deficient/abnormal gene: this is replacement or additive gene therapy;
[0105] a therapy aiming at gene or genome editing: in such a case, the purpose is to provide to a cell the necessary tools to correct the sequence or modify the expression or regulation of a deficient/abnormal gene so that a functional gene is expressed or an abnormal gene is suppressed (inactivated): this is gene editing therapy.

[0106] In additive gene therapy, the gene of interest may be a functional version of a gene, which is deficient or mutated in a patient, as is the case for example in a genetic disease. In such a case, the gene of interest will restore the expression of a functional gene. Thus, by gene editing or gene replacement a correct version of this gene is provided in target cells, in particular muscle and/or CNS cells or other target cells of affected patients, this may contribute to effective therapies against the disease.

[0107] Gene or genome editing uses one or more gene(s) of interest, such as:
[0108] a gene encoding a therapeutic RNA as defined above such as an interfering RNA like a shRNA or a microRNA, a guide RNA (gRNA) for use in combination with a Cas enzyme or similar enzyme, or an antisense RNA capable of exon skipping such as a modified small nuclear RNA (snRNA); and
[0109] a gene encoding a genome-editing enzyme as defined above such as an engineered nuclease like a meganuclease, zinc finger nuclease (ZFN), transcription activator-like effector-based nuclease (TALENs), Cas enzyme or similar enzymes; or a combination of such genes, and maybe also a fragment of a functional version of a gene for use as recombination template, as defined above.

[0110] Gene therapy is used for treating various inherited (genetic) or acquired diseases or disorders affecting the structure or function of target tissue(s), in particular muscle(s) and/or the CNS, including skeletal or cardiac muscle(s), the brain or spinal cord. The diseases may be caused by trauma, infection, degeneration, structural or metabolic defects, tumors, autoimmune disorders, stroke or others. Non-limiting examples of diseases that can be treated by gene therapy include neuromuscular genetic disorders such as muscular genetic disorders; cancer; neurodegenerative diseases and auto-immune diseases.

[0111] In some embodiments, the target gene for gene therapy (additive gene therapy or gene editing) is a gene responsible for a neuromuscular disease. Neuromuscular genetic disorders include in particular: Muscular dystrophies, Congenital muscular dystrophies, Congenital myopathies, Distal myopathies, Other myopathies, Myotonic syndromes, Ion Channel muscle diseases, Malignant hyperthermia, Metabolic myopathies, Hereditary Cardiomyopathies, Congenital myasthenic syndromes, Motor Neuron diseases, Hereditary paraplegia, Hereditary motor and sensory neuropathies and other neuromuscular disorders. In some preferred embodiments, the target gene for gene therapy (additive gene therapy or gene editing) is a gene responsible for a neuromuscular disease selected from the group comprising Duchenne muscular dystrophy (DMD gene), Limb-girdle muscular dystrophies (LGMDs) (CAPN3, DYSF, FKRP, ANO5 genes and others), Spinal muscular atrophy (SMN1 gene), myotubular myopathy (MTM1 gene), Pompe disease (GAA gene) and Glycogen storage disease III (GSD3) (AGL gene).

[0112] Dystrophinopathies are a spectrum of X-linked muscle diseases caused by pathogenic variants in DMD gene, which encodes the protein dystrophin. Dystrophinopathies comprises Duchenne muscular dystrophy (DMD), Becker muscular dystrophy (BMD) and DMD-associated dilated cardiomyopathy.

[0113] The Limb-girdle muscular dystrophies (LGMDs) are a group of disorders that are clinically similar to DMD but occur in both sexes as a result of autosomal recessive and autosomal dominant inheritance. Limb-girdle dystrophies are caused by mutation of genes that encode sarcoglycans and other proteins associated with the muscle cell membrane, which interact with dystrophin. The term LGMD1 refers to genetic types showing dominant inheritance (autosomal dominant), whereas LGMD2 refers to types with autosomal recessive inheritance. Pathogenic variants at more than 50 loci have been reported (LGMD1A to LGMD1G; LGMD2A to LGMD2W). Calpainopathy (LGMD2A) is caused by mutation of the gene CAPN3 with more than 450 pathogenic variants described. Contributing genes to LGMD phenotype include: anoctamin 5 (ANO5), blood vessel epicardial substance (BVES), calpain 3 (CAPN3), caveolin 3 (CAV3), CDP-L-ribitol pyrophosphorylase A (CRPPA), dystroglycan 1 (DAG1), desmin (DES), DnaJ heat shock protein family (Hsp40) homolog, subfamily B, member 6 (DNAJB6), dysferlin (DYSF), fukutin related protein (FKRP), fukutin (Fla), GDP-mannose pyrophosphorylase B (GMPPB), heterogeneous nuclear ribonucleoprotein D like (HNRNPDL), LIM zinc finger domain containing 2 (LIMS2), lain A:C (LMNA), myotilin (MYOT), plectin (PLEC), protein O-glucosyltransferase 1 (PLOGLUT1), protein O-linked mannose N-acetylglucosaminyltransferase 1 (beta 1,2-) (POMGNT1), protein O-mannose kinase (POMK), protein O-mannosyltransferase 1 (POMT1), protein O-mannosyltransferase 2 (POMT2), sarcoglycan alpha (SGCA), sarcoglycan beta (SGCB), sarcoglycan delta (SGCD), sarcoglycan gamma (SGCG), titin-cap (TCAP), transportin 3 (TNPO3), torsin 1A interacting protein (TOR1AIP1), trafficking protein particle complex 11 (TRAPPC11), tripartite motif containing 32 (TRIM 32) and titin (TTN). Major contributing genes to LGMD phenotype include CAPN3, DYSF, FKRP and ANO5 (Babi Ramesh Reddy Nallamilli et al., Annals of Clinical and Translational Neurology, 2018, 5, 1574-1587.

[0114] Spinal muscular atrophy is a genetic disorder caused by mutations in the Survival Motor Neuron 1 (SMN1) gene which is characterized by weakness and wasting (atrophy) in muscles used for movement.

[0115] X-linked myotubular myopathy is a genetic disorder caused by mutations in the myotubularin (MTM1) gene which affects muscles used for movement (skeletal muscles) and occurs almost exclusively in males. This condition is characterized by muscle weakness (myopathy) and decreased muscle tone (hypotonia).

[0116] Pompe disease is a genetic disorder caused by mutations in the acid alpha-glucosidase (GAA) gene. Mutations in the GAA gene prevent acid alpha-glucosidase from breaking down glycogen effectively, which allows this sugar to build up to toxic levels in lysosomes. This buildup damages organs and tissues throughout the body, particularly the muscles, leading to the progressive signs and symptoms of Pompe disease.

[0117] Glycogen storage disease III (GSD3) is an autosomal recessive metabolic disorder caused by homozygous or compound heterozygous mutation in the Amylo-Alpha-1, 6-Glucosidase, 4-Alpha-Glucanotransferase (AGL) gene which encodes the glycogen debrancher enzyme and associated with an accumulation of abnormal glycogen with short outer chains. Clinically, patients with GSD III present in infancy or early childhood with hepatomegaly, hypoglycemia, and growth retardation. Muscle weakness in those with Ma is minimal in childhood but can become more severe in adults; some patients develop cardiomyopathy.

[0118] Replacement or additive gene therapy may be used to treat cancer, in particular rhabdomyosarcomas. Genes of interest in cancer could regulate the cell cycle or the metabolism and migration of the tumor cells, or induce tumor cell death. For instance, inducible caspase-9 could be expressed in muscle cells to trigger cell death, preferably in combination therapy to elicit durable anti-tumor immune responses.

[0119] Gene editing may be used to modify gene expression in target cells, in particular muscle and/or CNS cells, in the case of auto-immunity or cancer, or to perturb the cycle of viruses in such cells. In such cases, preferably, the gene of interest is chosen from those encoding guide RNA (gRNA), site-specific endonucleases (TALEN, meganucleases, zinc finger nucleases, Cas nuclease), DNA templates and RNAi components, such as shRNA and microRNA. Tools such as CRISPR/Cas9 may be used for this purpose.

[0120] In some embodiments, gene therapy is used for treating diseases affecting other tissues, by expression of a therapeutic gene in target tissue, in particular, muscle and/or CNS tissue. This is useful to avoid expression of the therapeutic gene in the liver, in particular in patients having a concurrent hepatic disorder such as hepatitis. The therapeutic gene encodes preferably a therapeutic protein, peptide or antibody which is secreted from the muscle cells into the blood stream where it can be delivered to other target tissues such as for example the liver. Examples of therapeutic genes include with no limitation: Factor VIII, Factor IX and GAA genes.

[0121] In the various embodiments of the present invention, the pharmaceutical composition comprises a therapeutically effective amount of rAAV vector particle or cell. In the context of the invention a therapeutically effective amount refers to a dose sufficient for reversing, alleviating or inhibiting the progress of the disorder or condition to which such term applies, or reversing, alleviating or inhibiting the progress of one or more symptoms of the disorder or condition to which such term applies. The term “effective dose” or “effective dosage” is defined as an amount sufficient to achieve, or at least partially achieve, the desired effect.

[0122] The effective dose is determined and adjusted depending on factors such as the composition used, the route of administration, the physical characteristics of the individual under consideration such as sex, age and weight, concurrent medication, and other factors, that those skilled in the medical arts will recognize.

[0123] In the various embodiments of the present invention, the pharmaceutical composition comprises a pharmaceutically acceptable carrier and/or vehicle.

[0124] A “pharmaceutically acceptable carrier” refers to a vehicle that does not produce an adverse, allergic or other untoward reaction when administered to a mammal, especially a human, as appropriate. A pharmaceutically acceptable carrier or excipient refers to a non-toxic solid, semi-solid or liquid filler, diluent, encapsulating material or formulation auxiliary of any type.

[0125] Preferably, the pharmaceutical composition contains vehicles, which are pharmaceutically acceptable for a formulation capable of being injected. These may be in particular isotonic, sterile, saline solutions (monosodium or disodium phosphate, sodium, potassium, calcium or magnesium chloride and the like or mixtures of such salts), or dry, especially freeze-dried compositions which upon addition, depending on the case, of sterilized water or physiological saline, permit the constitution of injectable solutions.

[0126] The pharmaceutical forms suitable for injectable use include sterile aqueous solutions or suspensions. The solution or suspension may comprise additives which are compatible with viral vectors and do not prevent viral vector particle entry into target cells. In all cases, the form must be sterile and must be fluid to the extent that easy syringe ability exists. It must be stable under the conditions of manufacture and storage and must be preserved against the contaminating action of microorganisms, such as bacteria and fungi. An example of an appropriate solution is a buffer, such as phosphate buffered saline (PBS) or Ringer lactate.

[0127] The invention provides also a method for treating a disease by expression of a therapeutic gene in a target tissue, in particular muscle and/or CNS tissue, comprising: administering to a patient a therapeutically effective amount of the pharmaceutical composition as described above.

[0128] Another aspect of the invention relates to the rAAV vector particle, cell, pharmaceutical composition according to the present disclosure as a medicament, in particular for use in the treatment of a muscle or CNS disorder according to the present disclosure, in particular neuromuscular genetic disease.

[0129] The invention provides also a method for treating a muscle or CNS disorder, comprising: administering to a patient a therapeutically effective amount of the pharmaceutical composition as described above, comprising at least an active agent selected from an AAV vector particle or a cell of the invention, and a pharmaceutically acceptable carrier.

[0130] A further aspect of the invention relates to the use of a rAAV vector particle, cell according to the present disclosure in the manufacture of a medicament for the treatment of a muscle or CNS disorder, in particular neuromuscular genetic disease.

[0131] Another aspect of the invention relates to the use of a rAAV vector particle or a cell of the present disclosure for the treatment of a muscle or CNS disorder according to the present disclosure, in particular neuromuscular genetic disease.

[0132] A further aspect of the invention relates to a pharmaceutical composition for treatment of a muscle or CNS disorder according to the present disclosure, in particular neuromuscular genetic disease, comprising an AAV vector particle or a cell of the present disclosure as an active component.

[0133] A further aspect of the invention relates to a pharmaceutical comprising an AAV vector particle or a cell of the present disclosure for treating a muscle or CNS disorder according to the present disclosure, in particular neuromuscular genetic disease,

[0134] As used herein, the term “patient” or “individual” includes human and other mammalian subjects that receive either prophylactic or therapeutic treatment. Preferably, a patient or individual according to the invention is a human.

[0135] Treatment”, or “treating” as used herein, is defined as the application or administration of a therapeutic agent or combination of therapeutic agents to a patient, or application or administration of said therapeutic agents to an isolated tissue or cell line from a patient, who has a disease, in particular a muscle or CNS disorder with the purpose to cure, heal, alleviate, relieve, alter, remedy, ameliorate, improve or affect the disease, or any symptom of the disease. In particular, the terms “treat’ or treatment” refers to reducing or alleviating at least one adverse clinical symptom associated with the disease.

[0136] The term “treatment” or “treating” is also used herein in the context of administering the therapeutic agents prophylactically.

[0137] The pharmaceutical composition of the present invention is generally administered according to known procedures, at dosages and for periods of time effective to induce a therapeutic effect in the patient. The pharmaceutical composition may be administered by any convenient route, such as in a non-limiting manner by infusion or bolus injection, by absorption through epithelial or mucocutaneous linings (e.g., oral mucosa, rectal and intestinal mucosa, etc.). The administration can be systemic, local or systemic combined with local; systemic includes parenteral and oral, and local includes local and loco-regional. Systemic administration is preferably parenteral such as subcutaneous (SC), intramuscular (IM), intravascular such as intravenous (IV) or intraarterial; intraperitoneal (IP); intradermal (ID), epidural or else. The parenteral administration is advantageously by injection or perfusion. Local administration is preferably intracerebral, intracerebroventricular, intracisternal, and/or intrathecal administration. The administration may be for example by injection or perfusion. In some preferred embodiments, the administration is parenteral, preferably intravascular such as intravenous (IV) or intraarterial. In some other preferred embodiments, the administration is intracerebral, intracerebroventricular, intracisternal, and/or intrathecal administration, alone or combined with parenteral administration, preferably intravascular administration. In some other preferred embodiments, the administration is parenteral, preferably intravascular alone or combined with intracerebral, intracerebroventricular, intracisternal, and/or intrathecal administration.

[0138] The various embodiments of the present disclosure can be combined with each other and the present disclosure encompasses the various combinations of embodiments of the present disclosure.

[0139] The practice of the present invention will employ, unless otherwise indicated, conventional techniques, which are within the skill of the art. Such techniques are explained fully in the literature.

[0140] The invention will now be exemplified with the following examples, which are not limitative, with reference to the attached drawings in which:

### FIGURE LEGENDS

[0141] FIG. 1. Representation of AAV hybrids and parental capsids

[0142] On the top, schematic representation of VP1 amino acid sequence of AAV8 with the localization of the 12 HVRs (black boxes). The number of each HVR is indicated on the corresponding box. The amino acid coordinates indicate the position used for HVR substitutions. On the bottom, schematic representation of AAV8, #704 and the 6 hybrids capsids. VP1 amino acid sequences were multialigned using the ClustalW algorithm and compared to AAV8 sequences (in black). Grey colour indicates the amino acid variations specific to #704 capsid and present in the mutants.

[0143] FIG. 2. Specific tissue targeting of hybrid capsids

[0144] Luciferase activity of controls and new hydrid capsids. Each column represents the average of activity in at least 3 mice expressed as fold change versus AAV8. Standard deviations are displayed. Statistical analysis on fold change was performed using one-way ANOVA. Dunnett's multiple comparison test was used to compare the mean of each capsid with the mean of the controls (* versus #704, #versus AAV8). *, #=p<0.05; **, ##=p<0.01; ***, ###=p<0.001.

[0145] FIG. 3. Seroprevalence of new hybrid capsids

[0146] Level of anti-AAV capsid antibodies in hybrid and parental capsids assessed by ELISA in a cohort of 46 human sera. For each capsid, the sera are categorized in 3 groups according to the level of anti-AAV IgG. Statistical analysis is performed using χ² test with Monte Carlo simulation.

[0147] FIG. 4. Presence of anti-AAV capsid antibodies against new hybrid capsids

[0148] Presence of anti-AAV capsid antibodies assessed by ELISA in a pool of human IVIg. The level of antibodies in parental capsids is compared to A) mutant 1, B) mutant 2, C) mutant 3, D) mutant 4 and E) mutant 5. X-axis represents the serial dilutions of IVIg, y-axis the normalized OD values related to the presence of anti-AAV antibodies. The OD50 of each capsid is displayed in the graphs. F) OD50 of parental and hybrid capsids resulted from 2 independent experiments. Standard deviations are displayed. Statistical analysis was performed using one-way ANOVA. Dunnett's multiple comparison test was used to compare the mean of each capsid with the mean of the controls (* versus AAV8, #versus #704). *, #=p<0.05; **, ##=p<0.01; ***, ###=p<0.001.

[0149] FIG. 5. Specific tissue targeting of mutants with single HVR substitution

[0150] Luciferase activity of AAV8 and new hydrid capsids in six different organs. Each column represents the average of activity in at least 3 mice expressed as fold change versus AAV8. Standard deviations are displayed. Statistical analysis on fold change was performed using one-way ANOVA. Dunnett's multiple comparison test was used to compare the mean of each capsid with the mean of AAV8. *=p<0.05; **=p<0.01; ***=p<0.001.

[0151] FIG. 6. Anti-AAV capsid antibodies in mutants with single HVR substitutions

[0152] Presence of anti-AAV capsid antibodies assessed by ELISA in a pool of human IVIg. The level of antibodies in parental capsids is compared to A) AAV8-mut.HVR1, B) AAV8-mut.HVR3, C) AAV8-mut.HVR6, D) AAV8-mut.HVR7, E) AAV8-mut.HVR8, F) AAV8-mut.HVR9, G) AAV8-mut.HVR10, H) AAV8-mut.HVR11 and I) AAV8-mut.HVR12. X-axis represents the dilutions of IVIg, y-axis the normalized OD values related to the presence of anti-AAV antibodies. The OD50 of each capsid is displayed in the graphs. J) OD50 of parental and hybrid capsids resulted from 2 independent experiments. Standard deviations are displayed. Statistical analysis was performed using one-way ANOVA. Dunnett's multiple comparison test was used to compare the mean of each capsid with the mean of the controls (* versus AAV8, #versus #704). *, #=p<0.05; **, ##=p<0.01; ***, ###=p<0.001.

[0153] FIG. 7. Specific tissue targeting of mutants with different HVR5 substitutions

[0154] Luciferase activity of AAV8 and new hydrid capsids in six different organs. Each column represents the average of activity in at least 3 mice expressed as fold change versus AAV8. Standard deviations are displayed. Statistical analysis on fold change was performed using one-way ANOVA. Dunnett's multiple comparison test was used to compare the mean of each capsid with the mean of AAV8. *=p<0.05; **=p<0.01; ***=p<0.001.

[0155] FIG. 8. Specific tissue targeting of mutants with different HVR5-8 combinations

[0156] Luciferase activity of AAV8 and new hydrid capsids in five different organs. Each column represents the average of activity in at least 3 mice expressed as fold change versus AAV8. Standard deviations are displayed. Statistical analysis on fold change was performed using one-way ANOVA. Dunnett's multiple comparison test was used to compare the mean of each capsid with the mean of AAV8. *=p<0.05; **=p<0.01; ***=p<0.001.

[0157] FIG. 9. Specific tissue targeting of AAV9 mutants

[0158] Luciferase activity of AAV9 and AAV9-R5-704 capsids in six different organs. Each column represents the average of activity in at least 3 mice expressed as fold change versus AAV9. Standard deviations are displayed. Statistical analysis on fold change was performed using one-way ANOVA. Dunnett's multiple comparison test was used to compare the mean of each capsid with the mean of PBS. *=p<0.05; **=p<0.01; ***=p<0.001.

[0159] FIG. 10. Level of anti-AAV capsid antibodies in AAV9 hybrid capsids

[0160] Presence of anti-AAV capsid antibodies assessed by ELISA in a pool of human IVIg. A) The level of antibodies of parental capsids is compared to AAV9-R5-704. X-axis represents the serial dilutions of IVIg, y-axis the normalized OD values related to the presence of anti-AAV antibodies. The OD50 of each capsid is displayed in the graph. B) OD50 of parental and hybrid capsids resulted from 2 independent experiments. Standard deviations are displayed. Statistical analysis was performed using one-way ANOVA. Dunnett's multiple comparison test was used to compare the mean of each capsid with the mean of the controls (* versus AAV8, #versus #704). *, #=p<0.05; **, ##=p<0.01; ***, ###=p<0.001.

### EXAMPLES

### Materials and Methods

### 1. Plasmid Construction for New Hybrid Capsids

[0161] To construct the plasmid containing AAV2 Rep sequence and the new hybrid Cap genes, the capsid sequences were synthesized (GENEWIZ). The fragment was inserted in the plasmid pAAV2 which contains AAV2 Rep and AAV2 Cap in order to replace the AAV2 Cap with the corresponding new Cap sequence.

### 2. AAV Production

[0162] HEK293T cells were grown in suspension in 50 mL of serum-free medium. The cells were transfected with 3 plasmids: i) a transgene plasmid, containing AAV2 ITRs flanking an expression cassette ii) the helper plasmid pXX6, containing adenoviral sequences necessary for AAV production, and iii) a plasmid containing AAV Rep and Cap genes, defining the serotype of AAV. Two days after transfection, the cells were lysed to release the AAV particles.

[0163] The viral lysate was purified by affinity chromatography. Viral genomes were quantified by a TaqMan real-time PCR assay using primers and probes corresponding to the ITRs of the AAV vector genome (Rohr et al. J Virol Methods., 2002, 106, 81-8.doi: 10.1016/s0166-0934(02)00138-6).

### 3. In Vivo Studies

[0164] All mouse studies were performed according to the French and European legislation on animal care and experimentation (2010/63/EU) and approved by the local institutional ethical committee (protocol no. 2016-002C). AAV vectors were administered intravenously via the tail vein to 6 weeks old male C57Bl6/J mice. PBS-injected littermates were used as controls. 15 days after vector injections, tissues were harvested and homogenized in DNAse/RNAse free water using Fastprep tubes (6.5 m/s; 60 secondes).

### 4. Luciferase Activity

[0165] Luciferase assay was used to measure the expression of the reporter gene used as transgene. Tissue lysates were centrifuged at 10000 rpm for 10 min, the supernatant was diluted in lysis buffer in a white opaque 96-well plate. Luciferase activity was measured using EnSpire (PerkinElmer) through sequential injections of assay buffer containing ATP and luciferine.

[0166] Protein quantification was performed on the samples using BCA assay in order to normalize the RLU (relative luminescence unit) on the quantity protein. The final results were expressed as RLU/mg of protein and normalized as fold change versus AAV8 control.

### 5. Seroprevalence of the Capsids

[0167] ELISA was performed to assess the presence of anti-AAV capsid antibodies (Ab) in a cohort of human sera and in a commercial pool of human intravenous immunoglobulin (IVIg), prepared from the serum of 1000-1500 donors per batch. AAV capsids were coated at 1×10E9 vg/well on Maxisorp™ plates (Nunc) and incubated overnight at 4° C. Plates were washed three times with PBS containing 6% milk and incubated at room temperature for two hours. Plates were washed three times with PBS containing 0.05% Tween (PBS-T) and incubated one hour at 37° C. with the sera dilutions. Each sera sample was analyzed using 4 logarithmic serial dilutions (from 1:10 to 1:10000), whereas the pool of IVIg was analyzed using 8 semi-log serial dilutions (from 1:10 to 1:316000). Plates were washed three times with PBS-T and incubated one hour at 37° C. with a goat anti-human IgG conjugated with HRP (1:10000 dilution). Plates were washed three times with PBS-T and added with TMB substrate. The reaction was stopped with H2SO4 and the optical density (OD of the plates was read at 492 nm. For the analysis of human sera, a standard curve of IVIg was used to determine the level of anti-AAV capsid IgG in each tested serum. Results are expressed in μg of anti-AAV capsid IgG per ml of serum. Sera with an ELISA IgG titer less than 10 μg/ml were considered as seronegative. For the analysis of IVIg samples, the OD values of each capsid were expressed as percentage of signal and analyzed on Prism. A model of dose-response curve was used to determine the IVIg dilution at which a reduction of 50% of the OD signal was observed (OD50). The OD50 of the hybrid capsids were compared to those of the parental capsids.

### Example 1: Production and In Vivo Testing of Hybrid Capsid from AAV8 with Hypervariable Regions from Other AAV Serotypes

[0168] The design of capsids hereby described is based on the combination of the hypervariable regions (HVR) of two selected parental capsids: the well-known AAV8 serotype and the newly isolated AAV2/13 sequence. The aim of the rational shuffling strategy is to transfer capsid properties from donor to acceptor capsid without alteration of acceptor capsid seroprevalence. VP1 sequence from AAV2/13 was obtained by aligning all AAV2/13 sequences isolated from human liver (La Bella T et al., Gut., 2020, 69, 737-747.doi: 10.1136/gutjnl-2019-318281;), the resulting amino acid consensus sequence is equal to the sequence #704 isolated in human. The consensus AAV2/13 sequence will hereinafter be called #704 (SEQ ID NO: 2). AAV8 capsid corresponds to SEQ ID NO: 1.

[0169] The inventors have developed 6 hybrid capsids corresponding to a variable number of HVRs (FIG. 1):
[0170] AAV8-704 composed by AAV8 from amino acid 1 to 446 and #704 from aa 447 to 739. This hybrid includes the HVRs 1 to 4 of AAV8 and 5 to 12 of #704. AAV8-704 has the amino acid sequence SEQ ID NO: 31 and is encoded by the polynucleotide of SEQ ID NO: 74.
[0171] Mutant 1 composed by AAV8 from amino acid 1 to 446, #704 from aa 447 to 687 and AAV8 from 688 to 739. This hybrid includes the HVRs 1, 2, 3, 4 and 12 of AAV8 and 5 to 11 of #704. Mutant 1 has the amino acid sequence SEQ ID NO: 32 and is encoded by the polynucleotide of SEQ ID NO: 76.
[0172] Mutant 2 composed by AAV8 from amino acid 1 to 446, #704 from aa 447 to 613 and AAV8 from 614 to 739. This hybrid includes the HVRs 1, 2, 3, 4, 11 and 12 of AAV8 and 5 to 10 of #704. Mutant 2 has the amino acid sequence SEQ ID NO: 33 and is encoded by the polynucleotide of SEQ ID NO: 78.
[0173] Mutant 3 composed by AAV8 from amino acid 1 to 446, #704 from aa 447 to 570 and AAV8 from 571 to 739. This hybrid includes the HVRs 1, 2, 3, 4, 10, 11 and 12 of AAV8 and 5 to 9 of #704. Mutant 3 has the amino acid sequence SEQ ID NO: 34 and is encoded by the polynucleotide of SEQ ID NO: 80.
[0174] Mutant 4 composed by AAV8 from amino acid 1 to 446, #704 from aa 447 to 531 and AAV8 from 532 to 739. This hybrid includes the HVRs 1, 2, 3, 4, 9, 10, 11 and 12 of AAV8 and 5 to 8 of #704. Mutant 4 has the amino acid sequence SEQ ID NO: 35 and is encoded by the polynucleotide of SEQ ID NO: 82.
[0175] Mutant 5 composed by AAV8 from amino acid 1 to 446, #704 from aa 447 to 485 and AAV8 from 486 to 739. This hybrid includes all HVRs of AAV8 except the HVR5 from #704. Mutant 5 has the amino acid sequence SEQ ID NO: 36 and is encoded by the polynucleotide of SEQ ID NO: 84.

### Capsids Production, In Vivo Biodistribution and Seroprevalence

[0176] Recombinant AAV vectors were produced by cloning the mutated Cap genes described above in a plasmid suitable for AAV vector production. A transgene expression cassette flanked by AAV2 ITRs and expressing a luciferase reporter gene was encapsidated in the so derived AAV vectors. Triple transfection of HEK293 cells was used to produce the vectors followed by immunoaffinity column purification. All capsid sequences were efficiently produced as AAV vectors, except AAV8-704 which was excluded from the following in vivo analysis.

TABLE 1
Production of AAV vectors with hybrid capsid serotype

| Capsids | Median (vg/ml) |
|---|---|
| AAV8 | 1.1E+11 |
| #704 | 6.6E+10 |
| AAV8-704 | 3.3E+10 |
| Mutant 1 | 1.4E+11 |
| Mutant 2 | 4.9E+11 |
| Mutant 3 | 4.6E+11 |
| Mutant 4 | 1.6E+11 |
| Mutant 5 | 3.6E+11 |

[0177] The vectors were tested in wild-type C57Bl6/J mice through intravenous injection of the different vectors at the dose of 1×10¹¹ vg/mice. Fifteen days post-injection, animals were sacrificed and the levels of expression of the transgene were measured in isolated tissues (liver, spleen, quadriceps, triceps, diaphragm, heart, kidneys, brain, soleus, spinal-cord). Results were expressed as RLU (relative luminescence unit) per mg of protein and normalized as fold change versus AAV8 control (Table 2 and FIG. 2).

TABLE 2
Transgene expression in tissues (Fold change (RLU/mg) versus AAV8

| | | | | | | | Spinal | | | |
|---|---|---|---|---|---|---|---|---|---|---|
| | Liver | Heart | Diaphragm | Quadriceps | Triceps | Soleus | cord | Brain | Kidney | Spleen |
| PBS | 0.0 | 0.0 | 0.0 | 0.0 | 0.0 | 0.0 | 0.0 | 0.5 | 0.2 | 0.4 |
| AAV9 | 0.3 | 1.9 | 0.6 | 0.5 | 0.4 | 0.5 | 0.4 | 1.7 | 1.0 | 0.4 |
| AAV8 | 1.0 | 1.0 | 1.0 | 1.0 | 1.0 | 1.0 | 1.0 | 1.0 | 1.0 | 1.0 |
| #704 | 0.0 | 0.2 | 0.5 | 0.1 | 0.0 | 0.8 | 0.1 | 1.0 | 0.2 | 0.5 |
| Mutant 1 | 0.0 | 0.0 | 0.0 | 0.0 | 0.0 | 0.1 | 0.1 | 0.8 | 0.3 | 0.2 |
| Mutant 2 | 0.0 | 6.7 | 5.8 | 2.6 | 1.2 | 6.3 | 2.6 | 8.3 | 1.4 | 0.4 |
| Mutant 3 | 0.1 | 6.1 | 5.2 | 1.7 | 1.1 | 4.0 | 1.3 | 6.8 | 1.8 | 0.3 |
| Mutant 4 | 0.1 | 6.0 | 8.0 | 1.7 | 2.4 | 5.7 | 3.0 | 6.6 | 1.4 | 0.8 |
| Mutant 5 | 0.3 | 3.3 | 3.9 | 4.4 | 4.5 | 4.1 | 1.9 | 3.2 | 2.7 | 1.2 |

[0178] In the liver (FIG. 2A), the luciferase activity of AAV8 was significantly higher than all the other tested capsids. The parental capsid #704 completely detargeted the liver. Luciferase activity in liver of mice injected with mutant capsids progressively increased in capsids containing more HVRs from AAV8 reaching the highest level in mutant 5 bearing HVR5 of capsid #704.

[0179] In all tested muscles (FIG. 2B-F), all mutant capsids except mutant 1 outperformed the parental capsid #704 and showed higher efficiency to AAV8.

[0180] Increased transduction levels were also observed in the spinal cord for all mutants, in particular mutants 2 and 4, compared to the parental capsids (FIG. 2G), whereas a very low luciferase activity was observed for #704 and mutant 1.

[0181] In the brain (FIG. 2H), the luciferase activity of AAV8, #704 and mutant 1 was comparable to PBS injected mice. Interestingly, mutants 2, 3, 4 and 5 were able to target the brain with higher efficiency than AAV9, AAV8 and #704 (Table 2).

[0182] Finally, in contrast to #704 and mutant 1, mutant 5 was able to target the kidney with higher luciferase expression than AAV8. (FIG. 2I).

[0183] Taken together, these results showed that the novel AAV mutated capsids exhibit an increased tropism for muscles and CNS compared to their parental capsids suggesting that the combination of hypervariable regions from AAV8 and wild type #704 may represent a promising strategy for the development of novel capsids.

[0184] The inventors aimed at the identification of the minimal number of HVR regions that can be modified in a capsid without affecting capsid seroprevalence. The seroprevalence of the hybrid capsids was tested in parallel with the 2 parental capsids, AAV8 and #704. ELISA was performed to assess the presence of anti-AAV capsid antibodies (Ab) in a cohort of 46 human sera. As expected, giving the human origin of this capsid, the number of seropositive individuals was the highest for wild type #704 (n=25; FIG. 3). Decreasing number of seropositive individuals were observed for all mutants. In particular, mutant 4 and 5 showed significantly lower seropositive samples (n=10 and n=13, respectively) than parental capsid #704. Globally, the frequency of seropositive individuals gradually decreased in hybrid capsids containing lower number of HVR of #704 than AAV8 reaching 22% and 28% in mutant 4 and 5, respectively. Considering that the parental AAV8 capsid showed 30% of seropositivity in the tested cohort, these data suggest that the modifications of the HVR5, 6, 7 and 8 do not modify the immunogenic profile of the capsids. Similar results were also confirmed by analysing the level of anti-AAV capsid antibodies in a pool of human IVIg (FIG. 4). The OD50, defined as the IVIg dilution at which a reduction of 50% of the OD signal is observed, was used to compare the level of anti-AAV antibodies against the hybrids and parental capsids. An OD50 of 400 and 3370 was obtained for AAV8 and #704, respectively. Mutant 1, 2 and 3 displayed an OD50 significantly higher than the acceptor capsid (FIGS. 4A, B, C and F), whereas mutant 4 and 5 were totally comparable to AAV8 profile without any significant difference in OD50 (FIGS. 4D, E and F). All the mutants displayed an OD50 significantly lower than the donor capsids (FIG. 4F).

[0185] These results thus demonstrate that rational shuffling can be used as method to combine the capsid properties of multiple parental capsids. Furthermore, these results altogether demonstrate that rational shuffling can be used as method to transfer capsid properties from donor to acceptor capsid without alteration of acceptor capsid seroprevalence.

### Example 2: Production, In Vitro and In Vivo Testing of Hybrid Capsid from AAV8 with Single HVR Replacement

[0186] In order to better characterize the properties of the 12 HVRs from #704, the HVRs of AAV8 are substituted one by one with the corresponding HVR of wild type #704 capsid. The amino acid sequences of HVR2 and 4 of #704 are identical to AAV8, therefore 10 AAV8 capsids with a single HVR substitution are analyzed:
[0187] AAV8-mut.HVR1 (SEQ ID NO: 37) encoded by the polynucleotide of SEQ ID NO: 86;
[0188] AAV8-mut.HVR3 (SEQ ID NO: 38) encoded by the polynucleotide of SEQ ID N: 88;
[0189] AAV8-mut.HVR6 (SEQ ID NO: 39) encoded by the polynucleotide of SEQ ID NO: 90;
[0190] AAV8-mut.HVR7 (SEQ ID NO: 40) encoded by the polynucleotide of SEQ ID NO: 92;
[0191] AAV8-mut.HVR8 (SEQ ID NO: 41) encoded by the polynucleotide of SEQ ID NO: 94;
[0192] AAV8-mut.HVR9 (SEQ ID NO: 42) encoded by the polynucleotide of SEQ ID NO: 96;
[0193] AAV8-mut.HVR10 (SEQ ID NO: 43) encoded by the polynucleotide of SEQ ID NO: 98;
[0194] AAV8-mut.HVR11 (SEQ ID NO: 44) encoded by the polynucleotide of SEQ ID NO: 100; and
[0195] AAV8-mut.HVR12 (SEQ ID NO: 45) encoded by the polynucleotide of SEQ ID NO: 102.

[0196] Recombinant AAV vectors are produced by cloning the modified Cap genes in a plasmid suitable for vector production. A transgene expression cassette flanked by AAV2 ITRs and expressing a luciferase reporter gene is encapsidated in the so derived AAV vectors. Triple transfection of HEK293 cells is used to produce the vectors followed by immunoaffinity column purification. Vectors are tested in vitro in in cell lines and in primary cells obtained from a commercial source. In parallel, the vectors are tested in wild-type C57Bl6/J mice through intravenous injection of the different vectors at the dose of 1×10¹¹ vg/mice. Fifteen days post-injection, animals are sacrificed and the levels of expression of the transgene are measured in isolated tissues. The seroprevalence of mutant capsids is tested by ELISA as shown in EXAMPLE 1.

[0197] In all tested muscles, brain and spinal cord, all mutant capsids except AAV8-mut.HVR11 showed higher efficiency than AAV8 (FIG. 5). In particular, the luciferase activity of AAV8-mut.HVR3 and 12 was significantly higher than AAV8 in at least one muscle. Concerning CNS, AAV8-mut.HVR3, AAV8-mut.HVR9, AAV8-mut.HVR10 and AAV8-mut.HVR12 were significantly more efficient than AAV8 in spinal cord and/or brain. All mutants showed a seroprevalence significantly lower than donor capsid #704 and equivalent to acceptor capsid AAV8 (FIG. 6). The level of anti-AAV antibodies in AAV8-mut.HVR6 was significantly lower than acceptor capsid (OD50: 145 and 400 in mutant and AAV8, respectively), whereas AAV8-mut.HVR12 showed a low seroprevalence (OD50: 631) but still significantly higher than AAV8. These results suggest that the substitution of a single HVR can improve the acceptor tropism without altering its seroprevalence.

### Example 3: Production, In Vitro and In Vivo Testing of Hybrid Capsid from AAV8 with Different HVR5 from Wild Type AAV

[0198] The wild type capsids recently isolated in human liver (La Bella T et al., Gut., 2020, 69, 737-747.doi: 10.1136/gutjnl-2019-318281) represent the variability of AAV in a context of natural infection. These 59 capsids are characterized by specific amino acid variations involving also the HVR5. The alignment of wild type AAV capsids from two different genotypes, AAV2 and AAV2/13, AAV13 (GenBank accession number ABZ10812.1) and AAV2 (GenBank accession number YP_680426.1) allowed the identification of 19 unique HVR5 sequences including 4 from AAV2 serotype (wild-type AAV2; wild-type capsid #2102, #1343, #3013), 14 from AAV2/13 serotype (wild-type capsid #1704, #3086, #1591, #3142, #985, #M258, #1570, #2806, #2731, #1602, #667, #129, #217, #767) and 1 from AAV13 serotype (wild-type capsid #508). Similar to mutant 5 in EXAMPLE 1, new AAV8 mutants containing 12 different HVR5 substitutions are generated in order to characterize the properties of the new AAV mutants.

[0199] Mutant5-AAV2 (SEQ ID NO: 46) encoded by the polynucleotide of SEQ ID NO: 104, which comprises an HVR5 of SEQ ID NO: 187 encoded by the polynucleotide of SEQ ID NO: 201.

[0200] Mutant5-AAV13:
[0201] Mutant5-#508 (SEQ ID NO: 49) encoded by the polynucleotide of SEQ ID NO: 110), which comprises an HVR5 of SEQ ID NO: 186 encoded by the polynucleotide of SEQ ID NO: 200. SEQ ID NO: 186 is HVR5 sequence of AAV13.

[0202] Mutant5-AAV2/13:
[0203] Mutant5-#1704 (SEQ ID NO: 47) encoded by the polynucleotide of SEQ ID NO: 106, which comprises an HVR5 of SEQ ID NO: 176 encoded by the polynucleotide of SEQ ID NO: 190.
[0204] Mutant5-#3086 (SEQ ID NO: 48) encoded by the polynucleotide of SEQ ID NO: 108, which comprises an HVR5 of SEQ ID NO: 177 encoded by the polynucleotide of SEQ ID NO: 191.
[0205] Mutant5-#3142 (SEQ ID NO: 50) encoded by the polynucleotide of SEQ ID NO: 112, which comprises an HVR5 of SEQ ID NO: 178 encoded by the polynucleotide of SEQ ID NO: 192.
[0206] Mutant5-#M258 (SEQ ID NO: 51) encoded by the polynucleotide of SEQ ID NO: 114 which comprises an HVR5 of SEQ ID NO: 179 encoded by the polynucleotide of SEQ ID NO: 193.
[0207] Mutant5-#1570 (SEQ ID NO: 52) encoded by the polynucleotide of SEQ ID NO: 116, which comprises an HVR5 of SEQ ID NO: 180 encoded by the polynucleotide of SEQ ID NO: 194.
[0208] Mutant5-#2731 (SEQ ID NO: 53) encoded by the polynucleotide of SEQ ID NO: 118, which comprises an HVR5 of SEQ ID NO: 181 encoded by the polynucleotide of SEQ ID NO: 195.
[0209] Mutant5-#1602 (SEQ ID NO: 54) encoded by the polynucleotide of SEQ ID NO: 120, which comprises an HVR5 of SEQ ID NO: 182 encoded by the polynucleotide of SEQ ID NO: 196.
[0210] Mutant5-#667 (SEQ ID NO: 55) encoded by the polynucleotide of SEQ ID NO: 122, which comprises an HVR5 of SEQ ID NO: 183 encoded by the polynucleotide of SEQ ID NO: 197.
[0211] Mutant5-#129 (SEQ ID NO: 56) encoded by the polynucleotide of SEQ ID NO: 124), which comprises an HVR5 of SEQ ID NO: 184 encoded by the polynucleotide of SEQ ID NO: 198.
[0212] Mutant5-#767 (SEQ ID NO: 57) encoded by the polynucleotide of SEQ ID NO: 126), which comprises an HVR5 of SEQ ID NO: 185 encoded by the polynucleotide of SEQ ID NO: 199.

[0213] Mutant 5 (Example 1) comprises HVR5 from #704 which as the sequence SEQ ID NO: 175 encoded by the polynucleotide of SEQ ID NO: 189.

[0214] HVR5 from #704 (SEQ ID NO: 175) is present in other wild-type capsids of hybrid serotype 2/13 (#1010 (SEQ ID NO: 6); #2112, #1350, #668, #367, #1020, #1158, #2107 (SEQ ID NO: 11 to 17), #714 (SEQ ID NO: 19), #790, #976, #1286, #163, #685, #442, #2320 (SEQ ID NO: 22 to 29)).

[0215] HVR5 from AAV13 (SEQ ID NO: 186) is present in wild-type capsid #1024 (SEQ ID NO: 22) and #508 (SEQ ID NO: 9).

[0216] Recombinant AAV vectors are produced by cloning the modified Cap genes in a plasmid suitable for vector production. A transgene expression cassette flanked by AAV2 ITRs and expressing a luciferase reporter gene is encapsidated in the so derived AAV vectors. Triple transfection of HEK293 cells is used to produce the vectors followed by immunoaffinity column purification. Vectors are tested in vitro in in cell lines and in primary cells obtained from a commercial source. In parallel, the vectors are tested in wild-type C57Bl6/J mice through intravenous injection of the different vectors at the dose of 1×10¹¹ vg/mice. Fifteen days post-injection, animals are sacrificed and the levels of expression of the transgene are measured in isolated tissues. The seroprevalence of mutant capsids is tested by ELISA as shown in EXAMPLE 1.

[0217] All mutant capsids with HVR5 of AAV13 (Mutant5-#508) or hybrid AAV2/13 serotype showed higher efficiency than AAV8 in one or more of muscle, brain, and spinal cord. In particular, the luciferase activity of Mut5-#1704, Mut5-#3086 and Mut5-#M258 was significantly higher than AAV8 in at least one muscle. Mut5-#1704, Mut5-#3086 and Mut5-#3142 were significantly more efficient than AAV8 in spinal cord targeting. In contrast, mutant capsids with HVR5 of AAV2 serotype showed no improvement compared to AAV8 in all tested muscles, brain and spinal cord (FIG. 7).

[0218] These results suggest that AAV13 and AAV2/13 serotypes can be used as donor capsids for the substitution of the HVR5 of AAV8 using rational shuffling.

### Example 4: Production, In Vitro and In Vivo Testing of Hybrid Capsid from AAV8 with Different HVR5-8 from Wild Type AAV

[0219] Similar to mutant 4 in EXAMPLE 1, new AAV8 mutants containing the combinations of HVR5, 6, 7 and 8 naturally present in wild type AAV capsids are designed. The wild type capsids recently isolated in human liver (La Bella T et al., Gut., 2020, 69, 737-747.doi: 10.1136/gutjnl-2019-318281), AAV13 (GenBank accession numberABZ10812.1), AAV2 (GenBank accession number YP_680426.1) were multialigned allowing the identification of 27 unique combinations of HVR5, 6, 7 and 8 including 1 from AAV13 serotype (wild-type AAV13), 7 from AAV2 serotype (wild-type AAV2; #2497, #2102, #2087, #1449, #1343, #3013) and 19 from AAV2/13 serotype (#1704, #3086, #1024, #1591, #508, #3142, #2320, #1010, #985, #M258, #1570, #2806, #2731, #2112, #1602, #667, #129, #217, #767). 15 combinations were included in AAV8 capsid in order to characterize the properties of the new AAV mutants.
[0220] Mutant4-AAV13 (SEQ ID NO: 58) encoded by the polynucleotide of SEQ ID NO: 128);
[0221] Mutant4-AAV2 (SEQ ID NO: 59) encoded by the polynucleotide of SEQ ID NO: 130);
[0222] Mutant4-AAV2/13 serotype:
[0223] Mutant4-1704 (SEQ ID NO: 60) encoded by the polynucleotide of SEQ ID NO: 132);
[0224] Mutant4-3086 (SEQ ID NO: 61) encoded by the polynucleotide of SEQ ID NO: 134);
[0225] Mutant4-1024 (SEQ ID NO: 62) encoded by the polynucleotide of SEQ ID NO: 136);
[0226] Mutant4-508 (SEQ ID NO: 63) encoded by the polynucleotide of SEQ ID NO:138);
[0227] Mutant4-3142 (SEQ ID NO: 64) encoded by the polynucleotide of SEQ ID NO: 140);
[0228] Mutant4-2320 (SEQ ID NO: 65) encoded by the polynucleotide of SEQ ID NO: 142);
[0229] Mutant4-1010 (SEQ ID NO: 66) encoded by the polynucleotide of SEQ ID NO: 144);
[0230] Mutant4-M258 (SEQ ID NO: 67) encoded by the polynucleotide of SEQ ID NO: 146);
[0231] Mutant4-1570 (SEQ ID NO: 68) encoded by the polynucleotide of SEQ ID NO: 148);
[0232] Mutant4-1602 (SEQ ID NO: 69) encoded by the polynucleotide of SEQ ID NO: 150);
[0233] Mutant4-667 (SEQ ID NO: 70) encoded by the polynucleotide of SEQ ID NO: 152);
[0234] Mutant4-129 (SEQ ID NO: 71) encoded by the polynucleotide of SEQ ID NO: 154);
[0235] Mutant4-767 (SEQ ID NO: 72) encoded by the polynucleotide of SEQ ID NO: 156).

[0236] Mutant 4 (Example 1) comprises HVR5, HVR6, HVR7 and HVR8 from the capsid #704 (SEQ ID NO: 2). HVR5, HVR6, HVR7 and HVR8 from capsid #704 are present in other wild-type capsids of hybrid serotype 2/13 (#2112, #1350, #668, #367, #1020, #1158, #2107 (SEQ ID NO: 11 to 17), #714 (SEQ ID NO: 19), #790, #976, #1286, #163, #685, #442 (SEQ ID NO: 22 to 28)).

[0237] Recombinant AAV vectors are produced by cloning the modified Cap genes in a plasmid suitable for vector production. A transgene expression cassette flanked by AAV2 ITRs and expressing a luciferase reporter gene is encapsidated in the so derived AAV vectors. Triple transfection of HEK293 cells is used to produce the vectors followed by immunoaffinity column purification. Vectors are tested in vitro in in cell lines and in primary cells obtained from a commercial source. In parallel, the vectors are tested in wild-type C57Bl6/J mice through intravenous injection of the different vectors at the dose of 1×10¹¹ vg/mice. Fifteen days post-injection, animals are sacrificed and the levels of expression of the transgene are measured in isolated tissues. The seroprevalence of mutant capsids is tested by ELISA as shown in EXAMPLE 1.

[0238] The majority of mutant capsids with HVR5 to HVR8 of AAV2/13 serotype showed higher efficiency than AAV8 in muscle, brain, and/or spinal cord. Mut4-AAV13 and mut4-#M258 showed significantly higher luciferase activity than AAV8 in soleus and spinal cord, respectively. In contrast, mutant capsids with HVR5 of AAV2 serotype showed no improvement compared to AAV8 in all tested muscles and brain (FIG. 8).

[0239] These results suggest that the substitution of HVR5-8 of AAV8 with AAV13 or AAV2/13 serotype as donor capsids, can enhance muscle and/or CNS targeting the acceptor capsid.

### Example 5: Production, In Vitro and In Vivo Testing of Wild Type HVR5 on a Different Reference Capsid

[0240] The HVR5 of #704 is cloned in a different AAV reference capsid already used in gene therapy, AAV9 (GenBank Accession numbers: AY530579.1). AAV9-R5-704 (SEQ ID NO: 73) is encoded by the polynucleotide of SEQ ID NO: 158).

[0241] Recombinant AAV vectors are produced by cloning the modified Cap genes in a plasmid suitable for vector production. A transgene expression cassette flanked by AAV2 ITRs and expressing a luciferase reporter gene is encapsidated in the so derived AAV vectors. Triple transfection of HEK293 cells is used to produce the vectors followed by immunoaffinity column purification. Vectors are tested in vitro in in cell lines and in primary cells obtained from a commercial source. In parallel, the vectors are tested in wild-type C57Bl6/J mice through intravenous injection of the different vectors at the dose of 1×10¹¹ vg/mice. Fifteen days post-injection, animals are sacrificed and the levels of expression of the transgene are measured in isolated tissues. The seroprevalence of mutant capsids is tested by ELISA as shown in EXAMPLE 1.

[0242] The mutant capsid AAV9-R5-704 showed higher efficiency than AAV8 in muscle, brain, and spinal cord (FIG. 9). The mutant capsid AAV9-R5-704 showed a seroprevalence significantly lower than donor capsid #704 and equivalent to acceptor capsid AAV9 (FIG. 10).

[0243] These results show that the substitution of HVR5 using rational shuffling is a valuable method to improve muscle and/or CNS targeting of other acceptor capsids, like AAV9.

1-28. (canceled)

29. A method of preparation of a recombinant hybrid adeno-associated virus (AAV) capsid protein with improved tropism for muscle and/or central nervous system, comprising the steps of
a) providing at least two recombinant AAV capsid proteins from different AAV serotypes, an acceptor AAV capsid protein and at least one donor AAV capsid protein, wherein the donor AAV capsid serotype is AAV13 or hybrid AAV2/13;
b) replacing at least one hypervariable region (HVR) sequence chosen from HVR1 to HVR10 and HVR12 sequences of the acceptor AAV capsid protein with a different HVR sequence from the corresponding HVR of a donor AAV capsid protein, to obtain a recombinant hybrid AAV capsid protein with improved tropism for muscle and/or central nervous system compared to at least the parent acceptor AAV capsid protein.

30. The method of claim 29, wherein the acceptor AAV capsid serotype has a low seroprevalence and the donor AAV capsid serotype(s) has a higher seroprevalence than the acceptor AAV capsid serotype.

31. The method of claim 29, wherein the acceptor AAV capsid serotype is selected from the group consisting of: AAV8, AAV9, AAV5, AAV-LK03, AAVrh74, AAV9.rh74, AAV9.rh74-P1 and AAVrh10 and/or the donor AAV capsid serotype(s) is selected from the group consisting of AAV13 and the sequences SEQ ID NO: 2 to 30.

32. The method of claim 31, wherein the acceptor AAV capsid serotype is selected from the group consisting of: AAV8 and AAV9 and the donor AAV capsid serotype(s) is selected from the group consisting of AAV13 and the sequences SEQ ID NO: 2 to 30.

33. The method of claim 29, wherein the hybrid AAV capsid protein has a seroprevalence equivalent to the seroprevalence of the acceptor AAV capsid protein.

34. The method of claim 29, wherein the HVR sequence(s) of the donor AAV capsid protein and/or acceptor AAV capsid protein(s) are selected from the group consisting of an HVR1 sequence from positions 134 to 165, an HVR2 sequence from positions 176 to 192; an HVR3 sequence from positions 259 to 278; an HVR4 sequence from positions 379 to 395; an HVR5 sequence from positions 446 to 484; an HVR6 sequence from positions 490 to 500; an HVR7 sequence from positions 501 to 512; an HVR8 sequence from positions 514 to 529; an HVR9 sequence from positions 531 to 570; an HVR10 sequence from positions 576 to 613; and an HVR12 sequence from positions 705 to 736; the indicated positions being determined by alignment with SEQ ID NO: 1.

35. The method of claim 29, wherein step b) comprises replacing less than 8 HVR sequences such as up to 6 or up to 4 HVR sequences of the acceptor AAV capsid protein with different HVR sequence(s) from the corresponding HVR(s) of the donor AAV capsid protein(s).

39. The method of claim 29, wherein step b) comprises replacing at least HVR5 sequence of the acceptor AAV capsid protein with a different HVR5 sequence from the donor AAV capsid protein.

40. The method of claim 39, wherein said HVR5 sequence from the donor AAV capsid protein comprises a sequence selected from the group consisting of SEQ ID NO: 175 to 186.

41. The method of claim 39, wherein step b) comprises replacing HVR5 sequence alone or in combination with one or more or all of HVR6, HVR7 and HVR8 or with one or more or all HVR6, HVR7, HVR8, HVR9 and HVR10 of the acceptor AAV capsid protein.

42. The method of claim 29, wherein step b) comprises replacing any one of HVR1 to HVR10 and HVR12 sequence or any one of HVR3, HVR5, HVR9, HVR10 or HVR12 sequence of the acceptor AAV capsid protein with a different HVR sequence from the corresponding HVR of the donor AAV capsid protein.

43. A recombinant hybrid AAV capsid protein with improved tropism obtainable by the method of claim 29.

44. The recombinant hybrid AAV capsid protein of claim 43, which comprises an amino acid sequence selected from the group consisting of the sequences SEQ ID NO: 33 to 43, 45, 47 to 58 and 60 to 73 and the variant sequences having at least 85% identity with said sequences, and wherein the variant sequence has no mutations in at least the HVR sequences from the donor AAV capsid protein or all the HVR sequences.

45. A recombinant plasmid comprising a polynucleotide encoding in expressible form, a recombinant hybrid AAV capsid protein with improved tropism obtainable by the method of claim 29.

46. The recombinant plasmid of claim 45, which comprises a polynucleotide selected from the group consisting of the nucleotide sequences SEQ ID NO: 78, 80, 82, 84, 86, 88, 90, 92, 94, 96, 98, 102, 106, 108, 110, 112, 114, 116, 118, 120, 122, 124, 126, 128, 132, 134, 136, 138, 140, 142, 144, 146, 148, 150, 152, 154, 156 and 158.

47. A cell, stably transformed with a recombinant plasmid comprising a polynucleotide encoding, in expressible form, a recombinant hybrid AAV capsid protein with improved tropism obtainable by the method of claim 29.

48. An AAV vector particle packaging a gene of interest, which comprises at least one recombinant hybrid AAV capsid protein with improved tropism obtainable by the method of claim 29.

49. The AAV vector particle of claim 48, wherein the gene of interest is selected from the group consisting of: therapeutic genes; genes encoding therapeutic proteins or peptides such as therapeutic antibodies or antibody fragments and genome editing enzymes; and genes encoding therapeutic RNAs such as interfering RNAs, guide RNAs for genome editing and antisense RNAs capable of exon skipping.

50. A pharmaceutical composition comprising a therapeutically effective amount of AAV vector particle of claim 48, or cell stably transduced by said AAV vector particle.

51. A method of treatment of a muscle, central nervous system disease, and/or a neuromuscular genetic disease in a patient in need thereof, comprising administering to the patient a therapeutically effective amount of the pharmaceutical composition of claim 50.

The application's sequence listing, which the Patent Office published only in electronic form, follows.

SEQUENCE LISTING (202 sequences)

SEQ ID NO: 1 - protein, 738 aa, adeno-associated virus 8
MAADGYLPDWLEDNLSEGIREWWALKPGAPKPKANQQKQDDGRGLVLPGYKYLGPFNGLDKGEPVNAADAAALEHDKAYDQQLQAGDNPYLRYNHADAEFQERLQEDTSFGGNLGRAVFQAKKRVLEPLGLVEEGAKTAPGKKRPVEPSPQRSPDSSTGIGKKGQQPARKRLNFGQTGDSESVPDPQPLGEPPAAPSGVGPNTMAAGGGAPMADNNEGADGVGSSSGNWHCDSTWLGDRVITTSTRTWALPTYNNHLYKQISNGTSGGATNDNTYFGYSTPWGYFDFNRFHCHFSPRDWQRLINNNWGFRPKRLSFKLFNIQVKEVTQNEGTKTIANNLTSTIQVFTDSEYQLPYVLGSAHQGCLPPFPADVFMIPQYGYLTLNNGSQAVGRSSFYCLEYFPSQMLRTGNNFQFTYTFEDVPFHSSYAHSQSLDRLMNPLIDQYLYYLSRTQTTGGTANTQTLGFSQGGPNTMANQAKNWLPGPCYRQQRVSTTTGQNNNSNFAWTAGTKYHLNGRNSLANPGIAMATHKDDEERFFPSNGILIFGKQNAARDNADYSDVMLTSEEEIKTTNPVATEEYGIVADNLQQQNTAPQIGTVNSQGALPGMVWQNRDVYLQGPIWAKIPHTDGNFHPSPLMGGFGLKHPPPQILIKNTPVPADPPTTFNQSKLNSFITQYSTGQVSVEIEWELQKENSKRWNPEIQYTSNYYKSTSVDFAVNTEGVYSEPRPIGTRYLTRNL

SEQ ID NO: 2 - protein, 735 aa, adeno-associated virus #704
MAADGYLPDWLEDTLSEGIRQWWKLKPGPPPPKPAERHKDDSRGLVLPGYKYLGPFNGLDKGEPVNEADAAALEHDKAYDRQLDSGDNPYLKYNHADAEFQERLKEDTSFGGNLGRAVFQAKKRVLEPLGLVEEPVKTAPGKKRPVEHSPVEPDSSSGTGKAGQQPARKRLNFGQTGDADSVPDPQPLGQPPAAPSGLGSTTMATGSGAPMADNNEGADGVGNSSGNWHCDSQWLGDRVITTSTRTWALPTYNNHLYKQISSQSGASNDNHYFGYSTPWGYFDFNRFHCHFSPRDWQRLINNNWGFRPKRLNFKLFNIQVKEVTQNDGTTTIANNLTSTVQVFTDSEYQLPYVLGSAHQGCLPPFPADVFMVPQYGYLTLNNGSQAVGRSSFYCLEYFPSQMLRTGNNFQFSYTFEDVPFHSSYAHSQSLDRLMNPLIDQYLYYLNKTQSNSGTLQQSRLLFSQAGPTSMSLQAKNWLPGPCYRQQRLSKQANDNNNSNFPWTAATKYHLNGRDSLVNPGPAMASHKDDEEKFFPMHGTLIFGKQGTNANDADLDNVMITDEEEIRTTNPVATEQYGYVSNNLQNSNTGPTTGTVNHQGALPGMVWQDRDVYLQGPIWAKIPHTDGHFHPSPLMGGFGLKHPPPQIMIKNTPVPANPPTNFSSAKFASFITQYSTGQVSVEIEWELQKENSKRWNPEIQYTSNYNKSVNVDFTVDTNGVYSEPRPIGTRYLTRNL

SEQ ID NO: 3 - protein, 735 aa, adeno-associated virus #129
  misc_feature (451)..(451): Xaa can be any naturally occurring amino acid
MAADGYLPDWLEDTLSEGIRQWWKLKPGPPPPKPAERHQDDSRGLVLPGYKYLGPFNGLDKGEPVNEADAAALEHDKAYDRQLDSGDNPYLKYNHADAEFQERLKEDTSFGGNLGRAVFQAKKRVLEPLGLVEEPVKTAPGKKRPVEHSPAEPDSSSGTGKAGQQPARKRLNFGQTGDADSVPDPQPLGQPPAAPTSLGSTTMATGSGAPMADNNEGADGVGNSSGNWHCDSQWLGDRVITTSTRTWALPTYNNHLYKQISSQSGASNDNHYFGYSTPWGYFDFNRFHCHFSPRDWQRLINNNWGFRPKRLNFKLFNIQVKEVTQNDGTTTIANNLTSTVQVFTDSEYQLPYVLGSAHQGCLPPFPADVFMVPQYGYLTLNNGSQAVGRSSFYCLEYFPSQMLRTGNNFTFSYTFEDVPFHSSYAHSQSLDRLMNPLIDQYLYYLNRTQTXSGTPTQSRLLFSQAGPTSMSLQAKNWLPGPCYRQQRLSKQANDNNNSNFPWTGATKYHLNGRDSLVNPGPAMASHKDDEEKFFPMHGTLIFGKQGSEKTNAELENVMITDEEEIRTTNPVATEQYGSVSTNLQRGNRQAATADVNTQGVLPGMVWQDRDVYLQGPIWAKIPHTDGHFHPSPLMGGFGLKHPPPQILIKNTPVPANPSTTFSAAKFASFITQYSTGQVSVEIEWELQKENSKRWNPEIQYTSNYNKSVNVDFTVDTNGVYSEARPIGTRYLTRNL

SEQ ID NO: 4 - protein, 734 aa, adeno-associated virus #2731
MAADGYLPDWLEDTLSEGIRQWWKLKPGPPPPKPAERHKDDSRGLVLPGYKYLGPFNGLDKGEPVNEADAAALEHDKAYDRQLDSGDNPYLKYNHADAEFQERLKEDTSFGGNLGRAVFQAKKRVLEPLGLVEERVKTAPGKKRPVAVAHQWQTITRVPMEWVIPQEKRLNFGQTGDADWHCDPQPLGQPPAAPSGLGSTTMATGSGALLLLESLSADGVGNSSGNWHCDSQWLGDRVITTSTRTWALPTYNNHLYKQISSQSGASNDNHYFGYSTPWGYFDFNRFHCHFSPRDWQRLINNNWGFRPKRLNFKLFNIQVKEVTQNDGTTTIANNLTSTVQVFTDSEYQLPYVLGSAHQGCLPPFPADVFMVPQYGYLTLNNGSQAVGRSSFYCLEYFPSQMLRTGNNFQFSYTFEDVPFHSSYAHSQSLDRLMNPLIDQYLYYLNKTQSNSGTTTMSRLLFSQAGPTSMSLHAKNWLPGPCYRQQRLSKQANDNNNSNFPWTAATKYHLNGSDSLINPGPAMASHKDDEEKFFPQSGVLIFGKQGSEKTNVDIEKVMITDEEEIRTTNPVATEQYGSVSTNLQRGNRRAATADVNTQGVLPGMVWQDRDVYLQGPIWAKIPHTDGHFHPSPLMGGFGLKHPPPQILIKNTPVPANPSTTFSAAKFASFITQYSTGQVSVEIEWELQKENSKRWNPEIQYTSNYNKSVNVDFTVDTNGVYSEPRPIGTRYLTRNL

SEQ ID NO: 5 - protein, 735 aa, adeno-associated virus #1602
  misc_feature (57)..(57): Xaa can be any naturally occurring amino acid
  misc_feature (127)..(127): Xaa can be any naturally occurring amino acid
  misc_feature (131)..(131): Xaa can be any naturally occurring amino acid
  misc_feature (690)..(690): Xaa can be any naturally occurring amino acid
MAADGYLPDWLEDTLSEGIRQWWKLKPGPPPPKSAERHKDDSRGLVLPGYKYLGPFXGLDKGEPVNEADAAALEHDKAYDRQLDSGDNPYLKYNHADAEFQERLKEDTSFGGNLGRAVFQAKKRVLXPLGXVEEPVKTAPGKKRPVEHSPVEPDSSSGTGKAGQQPARKRLNFGQTGDSDSSSRDMRKVFSAAAPTSLGSTTMASGGGAPVADNNEGADGVGNSSGNWHCDSQWLGDRVITTSTRTWALPTYNNHLYKQISSQSGASNDNHYFGYSTPWGYFDFNRFHCHFSPRDWQRLINNNWGFRPKRLNFKLFNIQVKEVTQNDGTTTIANNLTSTVQVFTDSEYQLPYVLGSAHQGCLPPFPADVFMVPQYGYLTLNNGSQAVGRSSFYCLEYFPSQMLRTGNNFQFSYTFEDVPFHSSYAHSQSLDRLMNPLIDQYLYYLNKTQTNSGTLQQSRLLFSQAGPTNMSLQAKNWLPGPCYRQQRLSKQANDNNNSNFPWTAATKYHLNGRDSLVNPGPAMASHKDDEEKFFPQSGVLIFGKQGSEKTNVDIEKVMITDEEEIRTTNPVATEQYGSVSTNLQRGNRQAATADVNTQGVLPGMVWQDRDVYLQGPIWAKIPHTDGHFHPSPLMGGFGLKHPPPQILIKNTPVPANPSTTFSAAKFASFITQYSTGQVSVEIEWELQKEXSKRWNPEIQYTSNYNKSVNVDFTVDTNGVYSEPRPIGTRYLTRNL

SEQ ID NO: 6 - protein, 735 aa, adeno-associated virus #1010
  misc_feature (40)..(40): Xaa can be any naturally occurring amino acid
  misc_feature (345)..(345): Xaa can be any naturally occurring amino acid
  misc_feature (362)..(362): Xaa can be any naturally occurring amino acid
  misc_feature (387)..(387): Xaa can be any naturally occurring amino acid
MAADGYLPDWLGETLSQGIRQWWKLKPGPPPPKPAERHKXDSRGLVLPGYKYLGPFNGLDKGEPVNEADAAALEHDKAYDRQLDSGHIPYLKYNHADAEFQERLKEDTSFGGNLGRAVFQAKKRVLEPLGLVEEPVKTAPGKKRPVEHSPVEPDSSSGTGKAGQQPARKRLNFGQTGDADSVPDPQPLGQPPAAPSGLGTTTMATGSGAPVADNNEGADGVGNSSGNWHCDSQWLGDRVITTSTRTWALPTYNNHLYNFFQIKINASNDNHYFGYSTPWGYFDFNRFHCHFSPRDWQRLINNNWGFRPKRLNFKLFLIQVKEVTQNDGTTTIANNLTSTVQVFTXSEYQLPYVLGSAHQGCXPPFPADVFMVPQYGYLTLNNGSQAXGRSSFYCLEYFPSQMLRTGNNFQFSYTFEDVPFHSSYAHSQSLDRLMNPLIDQYLYYLNKTQSNSGTLQQSRLLFSQAGPTSMSLQAKNWLPGPCYRQQRVSKTSADNNNSEYSWTGATKYHLNGRDSLVNPGPAMASHKDDEEKFFPQSGVLIFGKQGSEKTNVDIEKVMITDEEEIRTTNPVATEQYGYVSNNLQNSNRQAATADVNTQGVLPGMVWQDRDVYLQGPIWAKIPHTDGHFHPSPLMGGFGLKHPPPQILIKNTPVPANPPTNFSSAKFASFITQYSTGQVSVEIEWELQKENSKRWNPEIQYTSNYNKSVNVDFTVDTNGVYSEPRPIGTRYLTRNL

SEQ ID NO: 7 - protein, 735 aa, adeno-associated virus #667
  misc_feature (330)..(330): Xaa can be any naturally occurring amino acid
  misc_feature (652)..(652): Xaa can be any naturally occurring amino acid
MAADGYLPDWLEDTLSEGIRQWWKLKPGPPPPKPAERHKDDSRGLVLPGYKYLGPFNGLDKGEPVNEADAAALEHDKAYDRQLDSGDNPYLKYNHADAEFQERLKEDTSFGGNLGRAVFQAKKRVLEPLGLVEEPVKTAPGKKRPVEHSPVEPDSSSGTGKAGQQPARKRLNFGQTGDADSVPDPQPLGQPPAAPSGLGTNTMATGSGAPMEDNNEGADGVGNSSGNWHCDSQWLGDRVITTSTRTWALPTYNNHLYKQICSQSGASNDNHYFGYSTRWGDFDFNRFHCHFSPRDWQRLINNNWGFRPKRLNFKLFNIQVKEVTQNDGTXTIANNLTSTVQVFTDSEYQLPYVLGSAHQGCLPPFPADVFMVPQYGYLTLNNGSQAVGRSSFYCLEYFPSQMLRTGNNFTFSYTFEDVPFHSSYAHSQSLDRLMNPLIDQYLYYLSRTNTPSGTTTQSRLLFSQAGPTSMSLQAKNWLPGPCYRQQRLSKQANDNNNSNFPWTAATKYHLNGRDSLVNPGPAMASHKDDEEKFFPQSGVLIFGKQGSEKTNVDIEKVMITDEEEIRTTNPVATEQYGYVSNNLQNSNTGPTTGTVNHQGALPGMVWQDRDVYLQGPIWAKIPHTDGHFHPSPLMGGFGLKHPPPQIMIKSSXVPANPPTNFSSAKFASFITQYSTGQVSVEIEWELQKENSKRWNPEIQYTSNYNKSVNVDFTVDTNGVYSEPRPIGTRYLTRNL

SEQ ID NO: 8 - protein, 732 aa, adeno-associated virus #767
MAADGYLPDWLEDTLSEGIRQWWKLKPGPPPPKPAERHKDDSRGLVLPGYKYLGPFNGLDKGEPVNEADAAALEHDKAYDRQLDSGDNPYLKYNHADAEFQERLKEDTSFGGNLGRAVFQAKKRVLEPLGLVEEPVKTAPGKKRPVEHSPAEPDSSSGTGKAGQQPARKRLNFGQTGDADSVPDPQPLGQPPAAPSGLGSTTMATGSGAPVADNNEGADGVGNSSGNWHCDSQWLGDRVITTSTRTWALPTYNNHLYKQISSQSGASNHYFGYSTPWGYFDFNRFHCHFSPRDWQRLINNNWGFRPKRLNFKLFNIQVKEVTQNDGTTTIANNLTSTVQVFTDSEYQLPYVLGSAHQGCLPPFPADVFMVPQYGYLTLNNGSQAVGRSSFYCLEYFPSQMLRTGNNFTFSYTFEDVPFHSSYAHSQSLDRLMNPLIDQYLYYLNKTQSSGTLQQSRLLFSQAGPTSMSLQARNWLPGPCYRQQRVSKTSADKNNSEYSWTAATKYHLNGRDSLVNPGPAMASHKDDEEKFFPMPGTLIFGKEGTNANNAELENVMITDEEEIRTTNPVATEQYGYVSNNLQNSNTGPTTGTVNHQGALPGMVWQDRDVYLQGPIWAKIPHTDGHFHPSPLMGGFGLKHPPPQIMIKNTPVPANPPTNFSAAKFASFITQYSTGQVSVEIEWELQKENSKRWNPEIQYTSNYNKSVNVDFTVDTNGVYSEPRPIGTRYLTRNL

SEQ ID NO: 9 - protein, 734 aa, adeno-associated virus #508
  misc_feature (128)..(129): Xaa can be any naturally occurring amino acid
  misc_feature (517)..(517): Xaa can be any naturally occurring amino acid
  misc_feature (526)..(526): Xaa can be any naturally occurring amino acid
  misc_feature (530)..(530): Xaa can be any naturally occurring amino acid
MAADGYLPDWLEDTLSEGIRQWWKLKPGPPPPKPAERHKDDSRGLVLPGYKYLGPFNGLDKGEPVNEADAAAIEHDKAYDRQLDSGDNPYLKYNHADAEFQERLKEDTSFGGNLGRAVFQAKKRVLEXXGLVEEPVKTAPGKKRPVAHSPAEPDSSSGTGKAGNQPARKRLNFGQTGDADSVPDPQPLGQPPAAPTSLGSTTMATGSGAPMADNNEGADGVGNSSGNWHCDSTWMGDRVITTSTRTWALPTYNNHLYKQISSQSGASNDNHYFGYSTPWGYFDFNRFHCHFSPRDWQRLINNNWGFRPKRLNFKLFNIQVKEVTQNDGTTTIANNLTSTVQVFTDSEYQLPYVLGSAHQGCLPPFPADVFMVPQYGYLTLNNGSQAVGRSSFYCLEYFPSQMLRTGNNFQFSYTFEDVPFHSSYAHSQSLDRLMNPLIDQYLYYLNRTQTASGTQQSRLLFSQAGPTSMSLQAKNWLPGPCYRQQRLSKQANDNNNSNYSWTGATKYHLNGRDSLVXPGPAMASHXDDEXKFFPMHGTLIFGKEGTNATNADLDNVMITDEEEIRTTNPVATEQYGYVSNNLQNSNTAATTETVNHQGALPGMVWQDRDVYLQGPIWAKIPHTDGHFHPSPLMGGFGLKNPPPQIMIKNTPVPANPPTNFSSAKFASFITQYSTGQVSVEIEWELQKENSKRWNPEIQYTSNYNKSVNVDFTVDTNGVYSEPRPIGTRYLTRNL

SEQ ID NO: 10 - protein, 735 aa, adeno-associated virus #1704
MAADGYLPDWLEDTLSEGIRQWWKLKPGPPPPKPAERHKDDSRGLVLPGYKYLGPFNGLDKGEPVNEADAAALEHDKAYDRQLDSGDNPYLKYNHADAEFQERLKEDTSFGGNLARAVFQAKKRVLEPLGLVEEPVKTAPGKKRPVEHSPAEPDSSSGTGKSGNQPARKRLNFGQTGDADSVPDPQPLGQPPAAPSGLGSTTMATGSGAPVADNNEGADGVGNSSGNWHCDSQWLGDRVITTSTRTWALPTYNNHLYKQISSQSGASNDNHYFGYSTPWGYFDFNRFHCHFSPRDWQRLINNNWGFRPKRLNFKLFNIQVKEVTQNDGTTTIANNLTSTVQVFTDSEYQLPYVLGSAHQGCLPPFPADVFMVPQYGYLTLNNGSQAVGRSSFYCLEYFPSQMLRTGNNFTFSYTFEDVPFHSSYAHSQSLDRLMNPLIDQYLYYLNKTQTNSGTLQQSRLLFSQAGPTSMSLQAKNWLPGPCYRQQRLSKQANDNNNSNFPWTAATKYHLNGRDSLVNPGPAMASHKDDEEKFFPMHGTLIFGKQGTNANDADLENVMITDEEEIRTTNPVATEQYGYVSNNLQNSNTGPTTGTVNHQGALPGMVWQDRDVYLQGPIWAKIPHTDGHFHPSPLMGGFGLKHPPPQIMIKNTPVPANPPTNFSSAKFASFITQYSTGQVSVEIEWELQKENSKRWNPEIQYTSNYNKSVNVDFTVDTNGVYSEPRPIGTRYLTRNL

SEQ ID NO: 11 - protein, 736 aa, adeno-associated virus #2112
  misc_feature (164)..(164): Xaa can be any naturally occurring amino acid
  misc_feature (168)..(168): Xaa can be any naturally occurring amino acid
  misc_feature (178)..(178): Xaa can be any naturally occurring amino acid
MAADGYLPDWLQENLFFDIRQWWKLKPGPPPPKPAERHQDNSRGLVLPGYKYLGPFNGLDKGEPVNEADAAALEHDKAYDRQLDSGDNPYLKYNHADAEFQERLKEDTSFGGNLGRAVFQAKKRVLEPLGLVEEPVKTAPGKKRPVEHSPAEPDSSSGTGKAGXQPAXKRLNFGQTGXADSVPDPQPLGQPPAAPSGLGTNTMATGSGAPVADNNEGADGVGNSSGNWHCDSQWLGDRVITTSTRTWALPTYNNHLYKQISSQSGASNDNHYFGYSTPWGYFDFNRFHCHFSPRDWQRLINNNWGFRPKRLNFKLFNIQVKEVTQNDGTTTIANNLTSTVQVFTDSEYQLPYVLGSAHQGCLPPFPADVFMVPQYGYLTLNNGSQAVGRSSFYCLEYFPSQMLRTGNNFQFSYTFEDVPFHSSYAHSQSLDRLMNPLIDQYLYYLNKTQSNSGTLQQSRLLFSQAGPTSMSLQAKNWLPGPCYRQQRLSKQANDNNKAGKRQQQQQLSLDCGYKVSTKWPGPAMASHKDDEEKFFPMHGTLIFGKQGTNANDADLDNVMITDEEEIRTTNPVATEQYGYVSNNLQNSNTGPTTGTVNHQGALPGMVWQDRDVYLQGPIWAKIPHTDGHFHPSPLMGGFGLKHPPPQIMIKNTPVPANPPTNFSSAKFASFITQYSTGQVSVEIEWELQKENSKRWNPEIQYTSNYNKSVNVDFTVDTNGVYSEPRPIGTRYLTRNL

SEQ ID NO: 12 - protein, 735 aa, adeno-associated virus #1350
MAADGYLPDWLEDTLSEGIRQWWKLKPGPPPPKPAERHKDDSRGLVLPGYKYLGPFNGLDKGEPVNEADAAALEHDKAYDRQLDSGDNPYLKYNHADAEFQERLKEDTSFGGNLGRAVFQAKKRVLEPLGLVEEPVKTAPGKKRPVEHSPVEPDSSSGTGKAGQQPARKRLNFGQTGDADSVPDPQPLGQPPAAPSGLGSTTMATGSGAPMADNNEGADGVGNSSGNWHCDSQWLGDRVITTSTRTWALPTYNNHLYKQISSQSGASNDNHYFGYSTPWGYFDFNRFHCHFSPRDWQRLINNNWGFRPKRLNFKLFNIQVKEVTQNDGTTTIANNLTSTVQVFTDSEYQLPYVLGSAHQGCLPPFPADVFMVPQYGYLTLNNGSQAVGRSSFYCLEYFPSQMLRTGNNFQFSYTFEDVPFHSSYAHSQSLDRLMNPLIDQYLYYLNKTQSNSGTLQQSRLLFSQAGPTSMSLQAKNWLPGPCYRQQRLSKQANDNNNSNFPWTAATKYHLNGRDSLVNPGPAMASHKDDEEKFFPMHGTLIFGKQGTNANDADLDNVMITDEEEIRTTNPVATEQYGYVSNNLQSGNTQAATGTVNHQGALPGMVWQDRDVYLQGPIWAKIPHTDGHFHPSPLMGGFGLKHPPPQIMIKNTPVPANPPTNFSSAKFASFITQYSTGQVSVEIEWELQKENSKRWNPEIQYTSNYNKSVNVDFTVDTNGVYSEPRPIGTRYLTRNL

SEQ ID NO: 13 - protein, 735 aa, adeno-associated virus #668
MAADGYLPDWLEDTLSEGIRQWWKLKPGPPPPKPAERHKDDNRGLVLPGYKYLGPFNGLDKGEPVNEADAAALEHDKAYDRQLDSGDNPYLKYNHADAEFQERLKEDTSFGGNLGRAVFQAKKRVLEPLGLVEEPVKTAPGKKRPVEHSPVEPDSSSGTGKAGQQPARKRLNFGQTGDADSVPDPQPLGQPPAAPSGLGSTTMATGSGAPMADNNEGADGVGNSSGNWHCDSQWLGDRVITTSTRTWALPTYNNHLYKQISSQSGASNDNHYFGYSTPWGYFDFNRFHCHFSPRDWQRLINNNWGFRPKRLNFKLFNIQVKEVTQNDGTTTIANNLTSTVQVFTDSEYQLPYVLGSAHQGCLPPFPADVFMVPQYGYLTLNNGSQAVGRSSFYCLEYFPSQMLRTGNNFQFSYTFEDVPFHSSYAHSQSLDRLMNPLIDQYLYYLNKTQSNSGTLQQSRLLFSQAGPTSMSLQAKNWLPGPCYRQQRLSKQANDNNNSNFPWTAATKYHLNGRDSLVNPGPAMASHKDDEEKFFPMHGTLIFGKQGTNANDADLDNVMITDEEEIRTTNPVATEQYGYVSNNLQNSNTGPTTGTVNHQGALPGMVWQDRDVYLQGPIWAKIPHTDGHFHPSPLMGGFGLKHPPPQIMIKNTPVPANPPTNFSSAKFASFITQYSTGQVSVEIEWELQKENSKRWNPEIQYTSNYNKSVNVDFTVDTNGVYSEPRPIGTRYLTRNL

SEQ ID NO: 14 - protein, 735 aa, adeno-associated virus #367
MAADGYLPDWLEDTLSEGIRQWWKLKPGPPPPKPAERHKDDSRGLVLPGYKYLGPFNGLDKGEPVNEADAAALEHDKAYDRQLDSGDNPYLKYNHADAEFQERLKEDTSFGGNLGRAVFQAKKRVLEPLGLVEEPVKTAPGKKRPVEHSPVEPDSSSGTGKAGQQPARKRLNFGQTGDADSVPDPQPLGQPPAAPSGLGSTTMATGSGAPVADNNEGADGVGNSSGNWHCDSQWLGDRVITTSTRTWALPTYNNHLYKQISSQSGASNDNHYFGYSTPWGYFDFNRFHCHFSPRDWQRLINNNWGFRPKRLNFKLFNIQVKEVTQNDGTTTIANNLTSTVQVFTDSEYQLPYVLGSAHQGCLPPFPADVFMVPQYGYLTLNNGSQAVGRSSFYCLEYFPSQMLRTGNNFQFSYTFEDVPFHSSYAHSQSLDRLMNPLIDQYLYYLNKTQSNSGTLQQSRLLFSQAGPTSMSLQAKNWLPGPCYRQQRLSKQANDNNNSNFPWTAATKYHLNGRDSLVNPGPAMASHKDDEEKFFPMHGTLIFGKQGTNANDADLDNVMITDEEEIRTTNPVATEQYGYVSNNLQNSNTGPTTGTVNHQGALPGMVWQDRDVYLQGPIWAKIPHTDGHFHPSPLMGGFGLKHPPPQIMIKNTPVPANPPTNFSSAKFASFITQYSTGQVSVEIEWELQKENSKRWNPEIQYTSNYNKSVNVDFTVDTNGVYSEPRPIGTRYLTRNL

SEQ ID NO: 15 - protein, 735 aa, adeno-associated virus #1020
MAADGYLPDWLEDTLSEGIRQWWKLKPGPPPPKPAERHKDDSRGLVLPGYKYLGPFNGLDKGEPVNEADAAALEHDKAYDRQLDSGDNPYLKYNHADAEFQERLKEDTSFGGNLGRAVFQAKKRVLEPLGLVEEPVKTAPGKKRPVEHSPVEPDSSSGTGKAGQQPARKRLNFGQTGDADSVPDPQPLGQPPAAPSGLGSTTMATGSGAPMADNNEGADGVGNSSGNWHCDSQWLGDRVITTSTRTWALPTYNNHLYKQISSQSGASNDNHYFGYSTPWGYFDFNRFHCHFSPRDWQRLINNNWGFRPKRLNFKLFNIQVKEVTQNDGTTTIANNLTSTVQVFTDSEYQLPYVLGSAHQGCLPPFPADVFMVPQYGYLTLNNGSQAVGRSSFYCLEYFPSQMLRTGNNFQFSYTFEDVPFHSSYAHSQSLDRLMNPLIDQYLYYLNKTQSNSGTLQQSRLLFSQAGPTSMSLQAKNWLPGPCYRQQRLSKQANDNNNSNFPWTAATKYHLNGRDSLVNPGPAMASHKDDEEKFFPMHGTLIFGKQGTNANDADLENVMITDEEEIRTTNPVATEQYGTVSNNLQNSNTGPTTGTVNHQGALPGMVWQDRDVYLQGPIWAKIPHTDGHFHPSPLMGGFGLKHPPPQIMIKNTPVPANPPTNFSSAKFASFITQYSTGQVSVEIEWELQKENSKRWNPEIQYTSNYNKSVNVDFTVDTNGVYSEPRPIGTRYLTRNL

SEQ ID NO: 16 - protein, 735 aa, adeno-associated virus #1158
MAADGYLPDWLEDTLSEGIRQWWKLKPGPPPPKPAERHKDDSRGLVLPGYKYLGPFNGLDKGEPVNEADAAALEHDKAYDRQLDSGDNPYLKYNHADAEFQERLKEDTSFGGNLGRAVFQAKKRVLEPLGLVEEPVKTAPGKKRPVEHSPVEPDSSSGTGKAGQQPARKRLNFGQTGDADSVPDPQPLGKPPAAPSGLGSTTMATGSGAPMADNNEGADGVGNSSGNWHCDSQWLGDRVITTSTRTWALPTYNNHLYKQISSQSGASNDNHYFGYSTPWGYFDFNRFHCHFSPRDWQRLINNNWGFRPKRLNFKLFNIQVKEVTQNDGTTTIANNLTSTVQVFTDSEYQLPYVLGSAHQGCLPPFPADVFMVPQYGYLTLNNGSQAVGRSSFYCLEYFPSQMLRTGNNFQFSYTFEDVPFHSSYAHSQSLDRLMNPLIDQYLYYLNKTQSNSGTLQQSRLLFSQAGPTSMSLQAKNWLPGPCYRQQRLSKQANDNNNSNFPWTAATKYHLNGRDSLVNPGPAMASHKDDEEKFFPMHGTLIFGKQGTNANDADLDNVMITDEEEIRTTNPVATEQYGYVSNNLQNSNTGPTTGTVNHQGALPGMVWQDRDVYLQGPIWAKIPHTDGHFHPSPLMGGFGLKHPPPQIMIKNTPVPANPPTNFSSSKFASFITQYSTGQVSVEIEWELQKENSKRWNPEIQYTSNYNKSVNVDFTVDTNGVYSEPRPIGTRYLTRNL

SEQ ID NO: 17 - protein, 735 aa, adeno-associated virus #2107; identical to SEQ ID NO: 14

SEQ ID NO: 18 - protein, 736 aa, adeno-associated virus #1570
  misc_feature (578)..(578): Xaa can be any naturally occurring amino acid
MAADGYLPDWLEDTLSEGIRQWWKLKPGPPPPKPAERHKDDSRGLVLPGYKYLGPFNGLDKGEPVNEADAAALEHDKAYDRQLDSGDNPYLKYNHADAEFQERLKEDTSFGGNLGRAVFQAKKRVLEPLGLVEEPVKTAPGKKRPVEHSPVEPDSSSGTGKAGQQPARKRLNFGQTGDADSVPDPQPLGQPPAAPSGLGSTTMATGSGAPVADNNEGADGVGNSSGNWHCDSQWLGDRVITTSTRTWALPTYNNHLYKQISSQSGASNDNHYFGYSTPWGYFDFNRFHCHFSPRDWQRLINNNWGFRPKRLNFKLFNIQVKEVTQNDGTTTIANNLTSTVQVFTDSEYQLPYVLGSAHQGCLPPFPADVFMVPQYGYLTLNNGSQAVGRSSFYCLEYFPSQMLRTGNNFQFSYTFEDVPFHSSYAHSQSLDRLMNPLIDQYLYYLNKTQANSGTLQQSRLLFSQAGPTSMSLQAKNWLPGPCYRQQRLSKQANDNNNSNFPWTAATKYHLNGRDSLVNPGPAMASHKDDEEEKFFPMHGTLIFGKQGTNANDADLDNVMITDEEEIRTTNPVATEQYXYVSNNLQNSNTGPTTGTVNHQGALPGMVWQDRDVYLQGPIWAKIPHTDGHFHPSPLMGGFGLKHPPPQIMIKNTPVPSPLMGGFGLKHPPPQITQYSTGQVSVEIEWELQKENSKRWNPEIQYTSNYNKSVNVDFTVDTNGVYSEPRPIGTRYLTRNL

SEQ ID NO: 19 - protein, 735 aa, adeno-associated virus #714
MAADGYLPDWLEDTLSEGIRQWWKLKPGPPPPKPAERHKDDSRGLVLPGYKYLGPFNGLDKGEPVNEADAAALEHDKAYDRQLDSGDNPYLKYNHADAEFQERLKEDTSFGGNLGRAVFQAKKRVLEPLGLVEEPVKTAPGKKRPVEHSPAEPDSSSGIGKAGQQPARKRLNFGQTGDADSVPDPQPLGQPPAAPSGLGSTTMATGSGAPVADNNEGADGVGNSSGNWHCDSQWLGDRVITTSTRTWALPTYNNHLYKQISSQSGASNDNHYFGYSTPWGYFDFNRFHCHFSPRDWQRLINNNWGFRPKRLNFKLFNIQVKEVTQNDGTTTIANNLTSTVQVFTDSEYQLPYVLGSAHQGCLPPFPADVFMVPQYGYLTLNNGSQAVGRSSFYCLEYFPSQMLRTGNNFQFSYTFEDVPFHSSYAHSQSLDRLMNPLIDQYLYYLNKTQSNSGTLQQSRLLFSQAGPTSMSLQAKNWLPGPCYRQQRLSKQANDNNNSNFPWTAATKYHLNGRDSLVNPGPAMASHKDDEEKFFPMHGTLIFGKQGTNANDADLDNVMITDEEEIRTTNPVATEQYGYVSNNLQNSNTGPTTGTVNHQGALPGMVWQDRDVYLQGPIWAKIPHTDGHFHPSPLMGGFGLKHPPPQIMIKNTPVPANPPTNFSSAKFASFITQYSTGQVSVEIEWELQKENSKRWNPEIQYTSNYNKSVNVDFTVDTNGVYSEPRPIGTRYLTRNL

SEQ ID NO: 20 - protein, 735 aa, adeno-associated virus #3086
MAADGYLPDWLEDTLSEGIRQWWKLKPGPPPPKPAERHKDNSRGLVLPGYKYLGPFNGLDKGEPVNEADAAALEHDKAYDRQLDSGDNPYLKYNHADAEFQERLKEDTSFGGNLGRAVFQAKKRVLEPLGLVEEPVKTAPGKKRPVEHSPVEPDSSSGTGKAGQQPAKKRLNFGQTGDADSVPDPQPLGQPPAAPSGLGSTTMATGSGAPMADNNEGADGVGNSSGNWHCDSQWLGDRVITTSTRTWALPTYNNHLYKQISSQSGASNDNHYFGYSTPWGYFDFNRFHCHFSPRDWQRLINNNWGFRPKRLNFKLFNIQVKEVTQNDGTTTIANNLTSTVQVFTDSEYQLPYVLGSAHQGCLPPFPADVFMVPQYGYLTLNNGSQAVGRSSFYCLEYFPSQMLRTGNNFQFSYTFEDVPFHSSYAHSQSLDRLMNPLIDQYLYYLNKTQSNSGTLQQSRLLFSQAGPTNMSLQAKNWLPGPCYRQQRLSKQANDNNNSNFPWTAATKYHLNGRDSLVNPGPAMASHKDDEEKFFPMHGTLIFGKQGTNANDADLDNVMITDEEEIRTTNPVATEQYGYVSNNLQNSNTGPTTGTVNHQGALPGMVWQDRDVYLQGPIWAKIPHTDGHFHPSPLMGGFGLKHPPPQIMIKNTPVPANPPTNFSSAKFASFITQYSTGQVSVEIEWELQKENSKRWNPEIQYTSNYNKSVNVDFTVDTNGVYSEPRPIGTRYLTRNL

SEQ ID NO: 21 - protein, 735 aa, adeno-associated virus #3142
MAADGYLPDWLEDTLSEGIRQWWKLKPGPPPPKPAERHKDDSRGLVLPGYKYLGPFNGLDKGEPVNEADAAALEHDKAYDRQLDSGDNPYLKYNHADAEFQERLKEDTSFGGNLGRAVFQAKKRVLEPLGLVEEPVKTAPGKKRPVEHSPAEPDSSSGTGKAGNQPARKRLNFGQTGDADSVPDPQPIGQPPAAPTSLGSTTMATGSGAPMADNNEGADGVGNSSGNWHCDSQWLGDRVITTSTRTWALPTYNNHLYKQISSQSGASNDNHYFGYSTPWGYFDFNRFHCHFSPRDWQRLINNNWGFRPKRLNFKLFNIQVKEVTQNDGTTTIANNLTSTVQVFTDSEYQLPYVLGSAHQGCLPPFPADVFMVPQYGYLTLNNGSQAVGRSSFYCLEYFPSQMLRTGNNFQFSYTFEDVPFHSSYAHSQSLDRLMNPLIDQYLYYLNKTQSNSGTVQQSRLLFSQAGPTSMSLQAKNWLPGPCYRQQRLSKQASDNNNSNFPWTAATKYHLNGRDSLVNPGPAMASHKDDEEKFFPMHGTLIFGKEGTTSNNADLEHVMITDEEEIRTTNPVATEQYGNVSNNLQNSNTGPTTENVNNQGALPGMVWQDRDVYLQGPIWAKIPHTDGHFHPSPLMGGFGLKHPPPQIMIKNTPVPANPPTNFSAAKFASFITQYSTGQVSVEIEWELQKENSKRWNPEIQYTSNYNKSVNVDFTVDTNGVYSEPRPIGTRYLTRNL

SEQ ID NO: 22 - protein, 734 aa, adeno-associated virus #1024
MAADGYLPDWLEDNLSEGIREWWALKPGAPQPKANQQHQDNARGLVLPGYKYLGPGNGLDKGEPVNAADAAALEHDKAYDKQLKAGDNPYLKYNHADAEFQERLKEDTSFGGNLGRAVFQAKKRVLEPLGLVEEPVKTAPGKKRPVEHSPAEPDSSSGTGKSGQQPARKRLNFGQTGDADSVPDPQPLGQPPAAPSGLGSTTMATGSGAPMADNNEGADGVGNSSGNWHCDSQWLGDRVITTSTRTWALPTYNNHLYKQISSQSGASNDNHYFGYSTPWGYFDFNRFHCHFSPRDWQRLINNNWGFRPKRLNFKLFNIQVKEVTQNDGTTTIANNLTSTVQVFTDSEYQLPYVLGSAHQGCLPPFPADVFMVPQYGYLTLNNGSQAVGRSSFYCLEYFPSQMLRTGNNFQFSYTFEDVPFHSSYAHSQSLDRLMNPLIDQYLYYLNRTQTASGTQQSRLLFSQAGPTSMSLQAKNWLPGPCYRQQRLSKQANDNNNSNFPWTAATKYHLNGRDSLVNPGPAMASHKDDEEKFFPMHGTLIFGKEGTNATNADLDNVMITDEEEIRTTNPVATEQYGYVSNNLQNSNTAATTETVNHQGALPGMVWQDRDVYLQGPIWAKIPHTDGHFHPSPLMGGFGLKHPPPQIMIKNTPVPANPPTNFSAAKFASFITQYSTGQVSVEIEWELQKENSKRWNPEIQYTSNYNKSVNVDFTVDTNGVYSEPRPIGTRYLTRNL

SEQ ID NO: 23 - protein, 735 aa, adeno-associated virus #790
MAADGYLPDWLEDTLSEGIRQWWKLKPGPPPPKPAERHKDDSRGLVLPGYKYLGPFNGLDKGEPVNEADAAALEHDKAYDRQLDSGDNPYLKYNHADAEFQERLKEDTSFGGNLGRAVFQAKKRVLEPLGLVEEPVKTAPGKKRPVEHSPVEPDSSSGTGKAGNQPARKRLNFGQTGDADSVPDPQPLGQPPAAPSGLGSTTMATGSGAPVADNNEGADGVGNSSGNWHCDSQWLGDRVITTSTRTWALPTYNNHLYKQISSQSGASNDNHYFGYSTPWGYFDFNRFHCHFSPRDWQRLINNNWGFRPKRLNFKLFNIQVKEVTQNDGTTTIANNLTSTVQVFTDSEYQLPYVLGSAHQGCLPPFPADVFMVPQYGYLTLNNGSQAVGRSSFYCLEYFPSQMLRTGNNFQFSYTFEDVPFHSSYAHSQSLDRLMNPLIDQYLYYLNKTQSNSGTLQQSRLLFSQAGPTSMSLQAKNWLPGPCYRQQRLSKQANDNNNSNFPWTAATKYHLNGRDSLVNPGPAMASHKDDEEKFFPMHGTLIFGKQGTNANDADLDNVMITDEEEIRTTNPVATEQYGYVSNNLQNSNTGPTTGTVNHQGALPGMVWQDRDVYLQGPIWAKIPHTDGHFHPSPLMGGFGLKHPPPQIMIKNTPVPANPPTNFSSAKFASFITQYSTGQVSVEIEWELQKENSKRWNPEIQYTSNYNKSVNVDFTVDTNGVYSEPRPIGTRYLTRNL

SEQ ID NO: 24 - protein, 735 aa, adeno-associated virus #976; identical to SEQ ID NO: 14

SEQ ID NO: 25 - protein, 735 aa, adeno-associated virus #1286; identical to SEQ ID NO: 14

SEQ ID NO: 26 - protein, 735 aa, adeno-associated virus #163
MAADGYLPDWLEDTLSEGIRQWWKLKPGPPPPKPAERHKDDSRGLVLPGYKYLGPFNGLDKGEPVNEADAAALEHDKAYDRQLDSGDNPYLKYNHADAEFQERLKEDTSFGGNLGRAVFQAKKRVLEPLGLVEEPVKTAPGKKRPVEHSPVEPDSSSGTGKAGQQPARKRLNFGQTGDADSVPDPQPLGQPPAAPSGLGSTTMATGSGAPVADNNEGADGVGNSSGNWHCDSQWLGDRVITTSTRTWALPTYNNHLYKQISSQSGASNDNHYFGYSTPWGYFDFNRFHCHFSPRDWQRLINNNWGFRPKKLNFKLFNIQVKEVTQNDGTTTIANNLTSTVQVFTDSEYQLPYVLGSAHQGCLPPFPADVFMVPQYGYLTLNNGSQAVGRSSFYCLEYFPSQMLRTGNNFQFSYTFEDVPFHSSYAHSQSLDRLMNPLIDQYLYYLNKTQSNSGTLQQSRLLFSQAGPTSMSLQAKNWLPGPCYRQQRLSKQANDNNNSNFPWTAATKYHLNGRDSLVNPGPAMASHKDDEEKFFPMHGTLIFGKQGTNANDADLDNVMITDEEEIRTTNPVATEQYGYVSNNLQNSNTGPTTGTVNHQGALPGMVWQDRDVYLQGPIWAKIPHTDGHFHPSPLMGGFGLKHPPPQIMIKNTPVPANPPTNFSSAKFASFITQYSTGQVSVEIEWELQKENSKRWNPEIQYTSNYNKSVNVDFTVDTNGVYSEPRPIGTRYLTRNL

SEQ ID NO: 27 - protein, 735 aa, adeno-associated virus #685
MAADGYLPDWLEDTLSEGIRQWWKLKPGPPPPKPAERHKDDSRGLVLPGYKYLGPFNGLDKGEPVNEADAAALEHDKAYDRQLDSGDNPYLKYNHADAEFQERLKEDTSFGGNLGRAVFQAKKRVLEPLGLVEEPVKTAPGKKRPVEHSPAEPDSSSGTGKAGQQPARKRLNFGQTGDADSVPDPQPLGQPPAAPSGLGSTTMATGSGAPMADNNEGADGVGNSSGNWHCDSQWLGNRVITTSTRTWALPTYNNHLYKQISSQSGASNDNHYFGYSTPWGYFDFNRFHCHFSPRDWQRLINNNWGFRPKRLNFKLFNIQVKEVTQNDGTTTIANNLTSTVQVFTDSEYQLPYVLGSAHQGCLPPFPADVFMVPQYGYLTLNNGSQAVGRSSFYCLEYFPSQMLRTGNNFQFSYTFEDVPFHSSYAHSQSLDRLMNPLIDQYLYYLNKTQSNSGTLQQSRLLFSQAGPTSMSLQAKNWLPGPCYRQQRLSKQANDNNNSNFPWTAATKYHLNGRDSLVNPGPAMASHKDDEEKFFPMHGTLIFGKQGTNANDADLDNVMITDEEEIRTTNPVATEQYGYVSNNLQNSNTGPTTGTVNHQGALPGMVWQDRDVYLQGPIWAKIPHTDGHFHPSPLMGGFGLKHPPPQIMIKNTPVPANPPTNFSSAKFASFITQYSTGQVSVEIEWELQKENSKRWNPEIQYTSNYNKSVNVDFTVDTNGVYSEPRPIGTRYLTRNL

SEQ ID NO: 28 - protein, 735 aa, adeno-associated virus #442
MAADGYLPDWLEDTLSEGIRQWWKLKPGPPPPKPAERHKDDSRGLVLPGYKYLGPFNGLDKGEPVNEADAAALEHDKAYDRQLDSGDNPYLKYNHADAEFQERLKEDTSFGGNLGRAVFQAKKRVLEPLGLVEEPVKTAPGKKRPVEHSPVEPDSSSGTGKAGQQPARKRLNFGQTGDADSVPDPQPLGQPPAAPSGLGSTTMATGSGAPMADNNEGADGVGNSSGNWHCDSQWLGDRVITTSTRTWALPTYNNHLYKQISSQSGASNDNHYFGYSTPWGYFDFNRFHCHFSPRDWQRLINNNWGFRPKRLNFKLFNIQVKEVTQNDGTTTIANNLTSTVQVFTDSEYQLPYVLGSAHQGCLPPFPADVFMVPQYGYLTLNNGSQAVGRSSFYCLEYFPSQMLRTGNNFQFSYTFEDVPFHSSYAHSQSLDRLMNPLIDQYLYYLNKTQSNSGTLQQSRLLFSQAGPTSMSLQAKNWLPGPCYRQQRLSKQANDNNNSNFPWTAATKYHLNGRDSLVNPGPAMASHKDDEEKFFPMHGTLIFGKQGTGRDNADLDNVMITDEEEIRTTNPVATEQYGYVSNNLQNSNTGPTTGTVNHQGALPGMVWQDRDVYLQGPIWAKIPHTDGHFHPSPLMGGFGLKHPPPQIMIKNTPVPANPPTNFSSAKFASFITQYSTGQVSVEIEWELQKENSKRWNPEIQYTSNYNKSVNVDFTVDTNGVYSEPRPIGTRYLTRNL

SEQ ID NO: 29 - protein, 735 aa, adeno-associated virus #2320
  misc_feature (196)..(196): Xaa can be any naturally occurring amino acid
MAADGYLPDWLEDTLSEGIRQWWKLKPGPPPPKPAERHKDDSRGLVLPGYKYLGPFNGLDKGEPVNEADAAALEHDKAYDRQLDSGDNPYLKYNHADAEFQERLKEDTSFGGNLGRAVFQAKKRVLETLGLVEEHVKTAPGKKRAVEHAHVEPDSSSGTGKAGQQPARKRLNFGQTGDADSVPDPQPLGQPPAAPXGLGSTTMASGSGAPMADNNEGADGVGNSSGNWHCDSQWLGDRVITTSTRTWALPTYNNHLYKQISSQSGASNDNHYFGYSTPWGYFDFNRFHCHFSPRDWQRLINNNWGFRPKRLNFKLFNIQVKEVTQNDGTTTIANNLTSTVQVFTDSEYQLPYVLGSAHQGCLPPFPADVFMVPQYGYLTLNNGSQAVGRSSFYCLEYFPSQMLRTGNNFQFSYTFEDVPFHSSYAHSQSLDRLMNPLIDQYLYYLNKTQSNSGTLQQSRLLFSQAGPTSMSLQAKNWLPGPCYRQQRLSKQATDNNNSEFPWTAATKYHLNGRDSLVNPGPAMASHKDDEEKFFPMHGTLIFGKQGTKCNDADLDNVMITDEEEIRTTNPVATEQYGYVSNNLQNSNTGPTTGTVNHQGALPGMVWQDRDVYLQGPIWAKIPHTDGHFHPSPLMGGFGLKHPPPQIMIKNTPVPANPPTNFSSAKFASFITQYSTGQVSVEIEWELQKENSKRWNPEIQYTSNYNKSVNVDFTVDTNGVYSEPRPIGTRYLTRNL

SEQ ID NO: 30 - protein, 736 aa, adeno-associated virus #M258
MAADGYLPDWLEDTLSEGIRQWWKLKPGPPPPKPAERHKDDSRGLVLPGYKYLGPFNGLDKGEPVNEADAAALEHDKAYDRQLDSGDNPYLKYNHADAEFQERLKEDTSFGGNLGRAVFQAKKRVLEPLGLVEEPVKTAPGKKRPVEHSPAEPDSSSGTGKAGNQPARKRLNFGQTGDADSVPDPQPLGEPPAAPTSLGSTTMASGGGAPVADNNEGADGVGNSSGKLALRFPMAGRQSHYHQHPNLGPAHLQQPSVQANFQPIRSQQRQPLILAHCNPWGYFDFNRFHCHFSPRDWQRLINNNWGFRPKRLNFKLFNIQVKEVTQNDGTTTIANNLTSTVQVFTDSEYQIPYVLGSAHQGCLPPFPADVFMVPQYGYLTLNNGSQAVGRSSFYCLEYFPSQMLRTGNNFQFSYTFEDVPFHSSYAHSQSLDRLMNPLIDQYLYYLNKTQSASGTVQQSRLLFSQAGPTSMSLQAKNWLPGPCYRQQRLSKQANENNNSNFPWTAATKYHLNGRDSLVNPGPAMASHKDDEEKFFPMHGTLIFGKQGTGRDNADLDNVMITDEEEIRTTNPVATEQYGYVSNNLQNSNTAPSTGTVNHQGALPGMVWQDRDVYLQGPIWAKIPHTDGHFHPSPLMGGFGLKHPPPQIMIKNTPVPANPPTNFSAAKFASFITQYSTGQVSVEIEWELQKENSKRWNPEIQYTSNYNKSVNVDFTVDTNGVYSEPRPIGTRYLTRNL

SEQ ID NO: 31 - protein, 738 aa, artificial sequence
  synthetic polypeptide (AAV8-704)
MAADGYLPDWLEDNLSEGIREWWALKPGAPKPKANQQKQDDGRGLVLPGYKYLGPFNGLDKGEPVNAADAAALEHDKAYDQQLQAGDNPYLRYNHADAEFQERLQEDTSFGGNLGRAVFQAKKRVLEPLGLVEEGAKTAPGKKRPVEPSPQRSPDSSTGIGKKGQQPARKRLNFGQTGDSESVPDPQPLGEPPAAPSGVGPNTMAAGGGAPMADNNEGADGVGSSSGNWHCDSTWLGDRVITTSTRTWALPTYNNHLYKQISNGTSGGATNDNTYFGYSTPWGYFDFNRFHCHFSPRDWQRLINNNWGFRPKRLSFKLFNIQVKEVTQNEGTKTIANNLTSTIQVFTDSEYQLPYVLGSAHQGCLPPFPADVFMIPQYGYLTLNNGSQAVGRSSFYCLEYFPSQMLRTGNNFQFTYTFEDVPFHSSYAHSQSLDRLMNPLIDQYLYYLNKTQSNSGTLQQSRLLFSQAGPTSMSLQAKNWLPGPCYRQQRLSKQANDNNNSNFPWTAATKYHLNGRDSLVNPGPAMASHKDDEEKFFPMHGTLIFGKQGTNANDADLDNVMITDEEEIRTTNPVATEQYGYVSNNLQNSNTGPTTGTVNHQGALPGMVWQDRDVYLQGPIWAKIPHTDGHFHPSPLMGGFGLKHPPPQIMIKNTPVPANPPTNFSSAKFASFITQYSTGQVSVEIEWELQKENSKRWNPEIQYTSNYNKSVNVDFTVDTNGVYSEPRPIGTRYLTRNL

SEQ ID NO: 32 - protein, 738 aa, artificial sequence
  synthetic polypeptide (Mutant 1)
MAADGYLPDWLEDNLSEGIREWWALKPGAPKPKANQQKQDDGRGLVLPGYKYLGPFNGLDKGEPVNAADAAALEHDKAYDQQLQAGDNPYLRYNHADAEFQERLQEDTSFGGNLGRAVFQAKKRVLEPLGLVEEGAKTAPGKKRPVEPSPQRSPDSSTGIGKKGQQPARKRLNFGQTGDSESVPDPQPLGEPPAAPSGVGPNTMAAGGGAPMADNNEGADGVGSSSGNWHCDSTWLGDRVITTSTRTWALPTYNNHLYKQISNGTSGGATNDNTYFGYSTPWGYFDFNRFHCHFSPRDWQRLINNNWGFRPKRLSFKLFNIQVKEVTQNEGTKTIANNLTSTIQVFTDSEYQLPYVLGSAHQGCLPPFPADVFMIPQYGYLTLNNGSQAVGRSSFYCLEYFPSQMLRTGNNFQFTYTFEDVPFHSSYAHSQSLDRLMNPLIDQYLYYLNKTQSNSGTLQQSRLLFSQAGPTSMSLQAKNWLPGPCYRQQRLSKQANDNNNSNFPWTAATKYHLNGRDSLVNPGPAMASHKDDEEKFFPMHGTLIFGKQGTNANDADLDNVMITDEEEIRTTNPVATEQYGYVSNNLQNSNTGPTTGTVNHQGALPGMVWQDRDVYLQGPIWAKIPHTDGHFHPSPLMGGFGLKHPPPQIMIKNTPVPANPPTNFSSAKFASFITQYSTGQVSVEIEWELQKENSKRWNPEIQYTSNYYKSTSVDFAVNTEGVYSEPRPIGTRYLTRNL

SEQ ID NO: 33 - protein, 738 aa, artificial sequence
  synthetic polyppetide (Mutant 2)
MAADGYLPDWLEDNLSEGIREWWALKPGAPKPKANQQKQDDGRGLVLPGYKYLGPFNGLDKGEPVNAADAAALEHDKAYDQQLQAGDNPYLRYNHADAEFQERLQEDTSFGGNLGRAVFQAKKRVLEPLGLVEEGAKTAPGKKRPVEPSPQRSPDSSTGIGKKGQQPARKRLNFGQTGDSESVPDPQPLGEPPAAPSGVGPNTMAAGGGAPMADNNEGADGVGSSSGNWHCDSTWLGDRVITTSTRTWALPTYNNHLYKQISNGTSGGATNDNTYFGYSTPWGYFDFNRFHCHFSPRDWQRLINNNWGFRPKRLSFKLFNIQVKEVTQNEGTKTIANNLTSTIQVFTDSEYQLPYVLGSAHQGCLPPFPADVFMIPQYGYLTLNNGSQAVGRSSFYCLEYFPSQMLRTGNNFQFTYTFEDVPFHSSYAHSQSLDRLMNPLIDQYLYYLNKTQSNSGTLQQSRLLFSQAGPTSMSLQAKNWLPGPCYRQQRLSKQANDNNNSNFPWTAATKYHLNGRDSLVNPGPAMASHKDDEEKFFPMHGTLIFGKQGTNANDADLDNVMITDEEEIRTTNPVATEQYGYVSNNLQNSNTGPTTGTVNHQGALPGMVWQDRDVYLQGPIWAKIPHTDGNFHPSPLMGGFGLKHPPPQILIKNTPVPADPPTTFNQSKLNSFITQYSTGQVSVEIEWELQKENSKRWNPEIQYTSNYYKSTSVDFAVNTEGVYSEPRPIGTRYLTRNL

SEQ ID NO: 34 - protein, 738 aa, artificial sequence
  synthetic polypeptide (Mutant 3)
MAADGYLPDWLEDNLSEGIREWWALKPGAPKPKANQQKQDDGRGLVLPGYKYLGPFNGLDKGEPVNAADAAALEHDKAYDQQLQAGDNPYLRYNHADAEFQERLQEDTSFGGNLGRAVFQAKKRVLEPLGLVEEGAKTAPGKKRPVEPSPQRSPDSSTGIGKKGQQPARKRLNFGQTGDSESVPDPQPLGEPPAAPSGVGPNTMAAGGGAPMADNNEGADGVGSSSGNWHCDSTWLGDRVITTSTRTWALPTYNNHLYKQISNGTSGGATNDNTYFGYSTPWGYFDFNRFHCHFSPRDWQRLINNNWGFRPKRLSFKLFNIQVKEVTQNEGTKTIANNLTSTIQVFTDSEYQLPYVLGSAHQGCLPPFPADVFMIPQYGYLTLNNGSQAVGRSSFYCLEYFPSQMLRTGNNFQFTYTFEDVPFHSSYAHSQSLDRLMNPLIDQYLYYLNKTQSNSGTLQQSRLLFSQAGPTSMSLQAKNWLPGPCYRQQRLSKQANDNNNSNFPWTAATKYHLNGRDSLVNPGPAMASHKDDEEKFFPMHGTLIFGKQGTNANDADLDNVMITDEEEIRTTNPVATEEYGIVADNLQQQNTAPQIGTVNSQGALPGMVWQNRDVYLQGPIWAKIPHTDGNFHPSPLMGGFGLKHPPPQILIKNTPVPADPPTTFNQSKLNSFITQYSTGQVSVEIEWELQKENSKRWNPEIQYTSNYYKSTSVDFAVNTEGVYSEPRPIGTRYLTRNL

SEQ ID NO: 35 - protein, 738 aa, artificial sequence
  synthetic polypeptide (Mutant 4)
MAADGYLPDWLEDNLSEGIREWWALKPGAPKPKANQQKQDDGRGLVLPGYKYLGPFNGLDKGEPVNAADAAALEHDKAYDQQLQAGDNPYLRYNHADAEFQERLQEDTSFGGNLGRAVFQAKKRVLEPLGLVEEGAKTAPGKKRPVEPSPQRSPDSSTGIGKKGQQPARKRLNFGQTGDSESVPDPQPLGEPPAAPSGVGPNTMAAGGGAPMADNNEGADGVGSSSGNWHCDSTWLGDRVITTSTRTWALPTYNNHLYKQISNGTSGGATNDNTYFGYSTPWGYFDFNRFHCHFSPRDWQRLINNNWGFRPKRLSFKLFNIQVKEVTQNEGTKTIANNLTSTIQVFTDSEYQLPYVLGSAHQGCLPPFPADVFMIPQYGYLTLNNGSQAVGRSSFYCLEYFPSQMLRTGNNFQFTYTFEDVPFHSSYAHSQSLDRLMNPLIDQYLYYLNKTQSNSGTLQQSRLLFSQAGPTSMSLQAKNWLPGPCYRQQRLSKQANDNNNSNFPWTAATKYHLNGRDSLVNPGPAMASHKDDEERFFPSNGILIFGKQNAARDNADYSDVMLTSEEEIKTTNPVATEEYGIVADNLQQQNTAPQIGTVNSQGALPGMVWQNRDVYLQGPIWAKIPHTDGNFHPSPLMGGFGLKHPPPQILIKNTPVPADPPTTFNQSKLNSFITQYSTGQVSVEIEWELQKENSKRWNPEIQYTSNYYKSTSVDFAVNTEGVYSEPRPIGTRYLTRNL

SEQ ID NO: 36 - protein, 738 aa, artificial sequence
  synthetic polypeptide (Mutant 5)
MAADGYLPDWLEDNLSEGIREWWALKPGAPKPKANQQKQDDGRGLVLPGYKYLGPFNGLDKGEPVNAADAAALEHDKAYDQQLQAGDNPYLRYNHADAEFQERLQEDTSFGGNLGRAVFQAKKRVLEPLGLVEEGAKTAPGKKRPVEPSPQRSPDSSTGIGKKGQQPARKRLNFGQTGDSESVPDPQPLGEPPAAPSGVGPNTMAAGGGAPMADNNEGADGVGSSSGNWHCDSTWLGDRVITTSTRTWALPTYNNHLYKQISNGTSGGATNDNTYFGYSTPWGYFDFNRFHCHFSPRDWQRLINNNWGFRPKRLSFKLFNIQVKEVTQNEGTKTIANNLTSTIQVFTDSEYQLPYVLGSAHQGCLPPFPADVFMIPQYGYLTLNNGSQAVGRSSFYCLEYFPSQMLRTGNNFQFTYTFEDVPFHSSYAHSQSLDRLMNPLIDQYLYYLNKTQSNSGTLQQSRLLFSQAGPTSMSLQAKNWLPGPCYRQQRVSTTTGQNNNSNFAWTAGTKYHLNGRNSLANPGIAMATHKDDEERFFPSNGILIFGKQNAARDNADYSDVMLTSEEEIKTTNPVATEEYGIVADNLQQQNTAPQIGTVNSQGALPGMVWQNRDVYLQGPIWAKIPHTDGNFHPSPLMGGFGLKHPPPQILIKNTPVPADPPTTFNQSKLNSFITQYSTGQVSVEIEWELQKENSKRWNPEIQYTSNYYKSTSVDFAVNTEGVYSEPRPIGTRYLTRNL

SEQ ID NO: 37 - protein, 737 aa, artificial sequence
  synthetic polypeptide (AAV8-mut.HVR1)
MAADGYLPDWLEDNLSEGIREWWALKPGAPKPKANQQKQDDGRGLVLPGYKYLGPFNGLDKGEPVNAADAAALEHDKAYDQQLQAGDNPYLRYNHADAEFQERLQEDTSFGGNLGRAVFQAKKRVLEPLGLVEEPVKTAPGKKRPVEHSPVEPDSSSGTGKAGQQPARKRLNFGQTGDSESVPDPQPLGEPPAAPSGVGPNTMAAGGGAPMADNNEGADGVGSSSGNWHCDSTWLGDRVITTSTRTWALPTYNNHLYKQISNGTSGGATNDNTYFGYSTPWGYFDFNRFHCHFSPRDWQRLINNNWGFRPKRLSFKLFNIQVKEVTQNEGTKTIANNLTSTIQVFTDSEYQLPYVLGSAHQGCLPPFPADVFMIPQYGYLTLNNGSQAVGRSSFYCLEYFPSQMLRTGNNFQFTYTFEDVPFHSSYAHSQSLDRLMNPLIDQYLYYLSRTQTTGGTANTQTLGFSQGGPNTMANQAKNWLPGPCYRQQRVSTTTGQNNNSNFAWTAGTKYHLNGRNSLANPGIAMATHKDDEERFFPSNGILIFGKQNAARDNADYSDVMLTSEEEIKTTNPVATEEYGIVADNLQQQNTAPQIGTVNSQGALPGMVWQNRDVYLQGPIWAKIPHTDGNFHPSPLMGGFGLKHPPPQILIKNTPVPADPPTTFNQSKLNSFITQYSTGQVSVEIEWELQKENSKRWNPEIQYTSNYYKSTSVDFAVNTEGVYSEPRPIGTRYLTRNL

SEQ ID NO: 38 - protein, 736 aa, artificial sequence
  synthetic polypeptide (AAV8-mut.HVR3)
MAADGYLPDWLEDNLSEGIREWWALKPGAPKPKANQQKQDDGRGLVLPGYKYLGPFNGLDKGEPVNAADAAALEHDKAYDQQLQAGDNPYLRYNHADAEFQERLQEDTSFGGNLGRAVFQAKKRVLEPLGLVEEGAKTAPGKKRPVEPSPQRSPDSSTGIGKKGQQPARKRLNFGQTGDSESVPDPQPLGEPPAAPSGVGPNTMAAGGGAPMADNNEGADGVGSSSGNWHCDSTWLGDRVITTSTRTWALPTYNNHLYKQISSQSGASNDNHYFGYSTPWGYFDFNRFHCHFSPRDWQRLINNNWGFRPKRLSFKLFNIQVKEVTQNEGTKTIANNLTSTIQVFTDSEYQLPYVLGSAHQGCLPPFPADVFMIPQYGYLTLNNGSQAVGRSSFYCLEYFPSQMLRTGNNFQFTYTFEDVPFHSSYAHSQSLDRLMNPLIDQYLYYLSRTQTTGGTANTQTLGFSQGGPNTMANQAKNWLPGPCYRQQRVSTTTGQNNNSNFAWTAGTKYHLNGRNSLANPGIAMATHKDDEERFFPSNGILIFGKQNAARDNADYSDVMLTSEEEIKTTNPVATEEYGIVADNLQQQNTAPQIGTVNSQGALPGMVWQNRDVYLQGPIWAKIPHTDGNFHPSPLMGGFGLKHPPPQILIKNTPVPADPPTTFNQSKLNSFITQYSTGQVSVEIEWELQKENSKRWNPEIQYTSNYYKSTSVDFAVNTEGVYSEPRPIGTRYLTRNL

SEQ ID NO: 39 - protein, 738 aa, artificial sequence
  synthetic polypeptide (AAV8-mut.HVR6)
MAADGYLPDWLEDNLSEGIREWWALKPGAPKPKANQQKQDDGRGLVLPGYKYLGPFNGLDKGEPVNAADAAALEHDKAYDQQLQAGDNPYLRYNHADAEFQERLQEDTSFGGNLGRAVFQAKKRVLEPLGLVEEGAKTAPGKKRPVEPSPQRSPDSSTGIGKKGQQPARKRLNFGQTGDSESVPDPQPLGEPPAAPSGVGPNTMAAGGGAPMADNNEGADGVGSSSGNWHCDSTWLGDRVITTSTRTWALPTYNNHLYKQISNGTSGGATNDNTYFGYSTPWGYFDFNRFHCHFSPRDWQRLINNNWGFRPKRLSFKLFNIQVKEVTQNEGTKTIANNLTSTIQVFTDSEYQLPYVLGSAHQGCLPPFPADVFMIPQYGYLTLNNGSQAVGRSSFYCLEYFPSQMLRTGNNFQFTYTFEDVPFHSSYAHSQSLDRLMNPLIDQYLYYLSRTQTTGGTANTQTLGFSQGGPNTMANQAKNWLPGPCYRQQRLSKQANDNNNSNFAWTAGTKYHLNGRNSLANPGIAMATHKDDEERFFPSNGILIFGKQNAARDNADYSDVMLTSEEEIKTTNPVATEEYGIVADNLQQQNTAPQIGTVNSQGALPGMVWQNRDVYLQGPIWAKIPHTDGNFHPSPLMGGFGLKHPPPQILIKNTPVPADPPTTFNQSKLNSFITQYSTGQVSVEIEWELQKENSKRWNPEIQYTSNYYKSTSVDFAVNTEGVYSEPRPIGTRYLTRNL

SEQ ID NO: 40 - protein, 738 aa, artificial sequence
  synthetic polypeptide (AAV8-mut.HVR7)
MAADGYLPDWLEDNLSEGIREWWALKPGAPKPKANQQKQDDGRGLVLPGYKYLGPFNGLDKGEPVNAADAAALEHDKAYDQQLQAGDNPYLRYNHADAEFQERLQEDTSFGGNLGRAVFQAKKRVLEPLGLVEEGAKTAPGKKRPVEPSPQRSPDSSTGIGKKGQQPARKRLNFGQTGDSESVPDPQPLGEPPAAPSGVGPNTMAAGGGAPMADNNEGADGVGSSSGNWHCDSTWLGDRVITTSTRTWALPTYNNHLYKQISNGTSGGATNDNTYFGYSTPWGYFDFNRFHCHFSPRDWQRLINNNWGFRPKRLSFKLFNIQVKEVTQNEGTKTIANNLTSTIQVFTDSEYQLPYVLGSAHQGCLPPFPADVFMIPQYGYLTLNNGSQAVGRSSFYCLEYFPSQMLRTGNNFQFTYTFEDVPFHSSYAHSQSLDRLMNPLIDQYLYYLSRTQTTGGTANTQTLGFSQGGPNTMANQAKNWLPGPCYRQQRVSTTTGQNNNSNFPWTAATKYHLNGRNSLANPGIAMATHKDDEERFFPSNGILIFGKQNAARDNADYSDVMLTSEEEIKTTNPVATEEYGIVADNLQQQNTAPQIGTVNSQGALPGMVWQNRDVYLQGPIWAKIPHTDGNFHPSPLMGGFGLKHPPPQILIKNTPVPADPPTTFNQSKLNSFITQYSTGQVSVEIEWELQKENSKRWNPEIQYTSNYYKSTSVDFAVNTEGVYSEPRPIGTRYLTRNL

SEQ ID NO: 41 - protein, 738 aa, artificial sequence
  synthetic polypeptide (AAV8-mut.HVR8)
MAADGYLPDWLEDNLSEGIREWWALKPGAPKPKANQQKQDDGRGLVLPGYKYLGPFNGLDKGEPVNAADAAALEHDKAYDQQLQAGDNPYLRYNHADAEFQERLQEDTSFGGNLGRAVFQAKKRVLEPLGLVEEGAKTAPGKKRPVEPSPQRSPDSSTGIGKKGQQPARKRLNFGQTGDSESVPDPQPLGEPPAAPSGVGPNTMAAGGGAPMADNNEGADGVGSSSGNWHCDSTWLGDRVITTSTRTWALPTYNNHLYKQISNGTSGGATNDNTYFGYSTPWGYFDFNRFHCHFSPRDWQRLINNNWGFRPKRLSFKLFNIQVKEVTQNEGTKTIANNLTSTIQVFTDSEYQLPYVLGSAHQGCLPPFPADVFMIPQYGYLTLNNGSQAVGRSSFYCLEYFPSQMLRTGNNFQFTYTFEDVPFHSSYAHSQSLDRLMNPLIDQYLYYLSRTQTTGGTANTQTLGFSQGGPNTMANQAKNWLPGPCYRQQRVSTTTGQNNNSNFAWTAGTKYHLNGRDSLVNPGPAMASHKDDEERFFPSNGILIFGKQNAARDNADYSDVMLTSEEEIKTTNPVATEEYGIVADNLQQQNTAPQIGTVNSQGALPGMVWQNRDVYLQGPIWAKIPHTDGNFHPSPLMGGFGLKHPPPQILIKNTPVPADPPTTFNQSKLNSFITQYSTGQVSVEIEWELQKENSKRWNPEIQYTSNYYKSTSVDFAVNTEGVYSEPRPIGTRYLTRNL

SEQ ID NO: 42 - protein, 738 aa, artificial sequence
  synthetic polypeptide (AAV8-mut.HVR9)
MAADGYLPDWLEDNLSEGIREWWALKPGAPKPKANQQKQDDGRGLVLPGYKYLGPFNGLDKGEPVNAADAAALEHDKAYDQQLQAGDNPYLRYNHADAEFQERLQEDTSFGGNLGRAVFQAKKRVLEPLGLVEEGAKTAPGKKRPVEPSPQRSPDSSTGIGKKGQQPARKRLNFGQTGDSESVPDPQPLGEPPAAPSGVGPNTMAAGGGAPMADNNEGADGVGSSSGNWHCDSTWLGDRVITTSTRTWALPTYNNHLYKQISNGTSGGATNDNTYFGYSTPWGYFDFNRFHCHFSPRDWQRLINNNWGFRPKRLSFKLFNIQVKEVTQNEGTKTIANNLTSTIQVFTDSEYQLPYVLGSAHQGCLPPFPADVFMIPQYGYLTLNNGSQAVGRSSFYCLEYFPSQMLRTGNNFQFTYTFEDVPFHSSYAHSQSLDRLMNPLIDQYLYYLSRTQTTGGTANTQTLGFSQGGPNTMANQAKNWLPGPCYRQQRVSTTTGQNNNSNFAWTAGTKYHLNGRNSLANPGIAMATHKDDEEKFFPMHGTLIFGKQGTNANDADLDNVMITDEEEIRTTNPVATEEYGIVADNLQQQNTAPQIGTVNSQGALPGMVWQNRDVYLQGPIWAKIPHTDGNFHPSPLMGGFGLKHPPPQILIKNTPVPADPPTTFNQSKLNSFITQYSTGQVSVEIEWELQKENSKRWNPEIQYTSNYYKSTSVDFAVNTEGVYSEPRPIGTRYLTRNL

SEQ ID NO: 43 - protein, 738 aa, artificial sequence
  synthetic polypeptide (AAV8-mut.HVR10)
MAADGYLPDWLEDNLSEGIREWWALKPGAPKPKANQQKQDDGRGLVLPGYKYLGPFNGLDKGEPVNAADAAALEHDKAYDQQLQAGDNPYLRYNHADAEFQERLQEDTSFGGNLGRAVFQAKKRVLEPLGLVEEGAKTAPGKKRPVEPSPQRSPDSSTGIGKKGQQPARKRLNFGQTGDSESVPDPQPLGEPPAAPSGVGPNTMAAGGGAPMADNNEGADGVGSSSGNWHCDSTWLGDRVITTSTRTWALPTYNNHLYKQISNGTSGGATNDNTYFGYSTPWGYFDFNRFHCHFSPRDWQRLINNNWGFRPKRLSFKLFNIQVKEVTQNEGTKTIANNLTSTIQVFTDSEYQLPYVLGSAHQGCLPPFPADVFMIPQYGYLTLNNGSQAVGRSSFYCLEYFPSQMLRTGNNFQFTYTFEDVPFHSSYAHSQSLDRLMNPLIDQYLYYLSRTQTTGGTANTQTLGFSQGGPNTMANQAKNWLPGPCYRQQRVSTTTGQNNNSNFAWTAGTKYHLNGRNSLANPGIAMATHKDDEERFFPSNGILIFGKQNAARDNADYSDVMLTSEEEIKTTNPVATEQYGYVSNNLQNSNTGPTTGTVNHQGALPGMVWQDRDVYLQGPIWAKIPHTDGNFHPSPLMGGFGLKHPPPQILIKNTPVPADPPTTFNQSKLNSFITQYSTGQVSVEIEWELQKENSKRWNPEIQYTSNYYKSTSVDFAVNTEGVYSEPRPIGTRYLTRNL

SEQ ID NO: 44 - protein, 738 aa, artificial sequence
  synthetic polypeptide (AAV8-mut.HVR11)
MAADGYLPDWLEDNLSEGIREWWALKPGAPKPKANQQKQDDGRGLVLPGYKYLGPFNGLDKGEPVNAADAAALEHDKAYDQQLQAGDNPYLRYNHADAEFQERLQEDTSFGGNLGRAVFQAKKRVLEPLGLVEEGAKTAPGKKRPVEPSPQRSPDSSTGIGKKGQQPARKRLNFGQTGDSESVPDPQPLGEPPAAPSGVGPNTMAAGGGAPMADNNEGADGVGSSSGNWHCDSTWLGDRVITTSTRTWALPTYNNHLYKQISNGTSGGATNDNTYFGYSTPWGYFDFNRFHCHFSPRDWQRLINNNWGFRPKRLSFKLFNIQVKEVTQNEGTKTIANNLTSTIQVFTDSEYQLPYVLGSAHQGCLPPFPADVFMIPQYGYLTLNNGSQAVGRSSFYCLEYFPSQMLRTGNNFQFTYTFEDVPFHSSYAHSQSLDRLMNPLIDQYLYYLSRTQTTGGTANTQTLGFSQGGPNTMANQAKNWLPGPCYRQQRVSTTTGQNNNSNFAWTAGTKYHLNGRNSLANPGIAMATHKDDEERFFPSNGILIFGKQNAARDNADYSDVMLTSEEEIKTTNPVATEEYGIVADNLQQQNTAPQIGTVNSQGALPGMVWQNRDVYLQGPIWAKIPHTDGHFHPSPLMGGFGLKHPPPQIMIKNTPVPANPPTNFSSAKFASFITQYSTGQVSVEIEWELQKENSKRWNPEIQYTSNYYKSTSVDFAVNTEGVYSEPRPIGTRYLTRNL

SEQ ID NO: 45 - protein, 738 aa, artificial sequence
  synthetic polypeptide (AAV8-mut.HVR12)
MAADGYLPDWLEDNLSEGIREWWALKPGAPKPKANQQKQDDGRGLVLPGYKYLGPFNGLDKGEPVNAADAAALEHDKAYDQQLQAGDNPYLRYNHADAEFQERLQEDTSFGGNLGRAVFQAKKRVLEPLGLVEEGAKTAPGKKRPVEPSPQRSPDSSTGIGKKGQQPARKRLNFGQTGDSESVPDPQPLGEPPAAPSGVGPNTMAAGGGAPMADNNEGADGVGSSSGNWHCDSTWLGDRVITTSTRTWALPTYNNHLYKQISNGTSGGATNDNTYFGYSTPWGYFDFNRFHCHFSPRDWQRLINNNWGFRPKRLSFKLFNIQVKEVTQNEGTKTIANNLTSTIQVFTDSEYQLPYVLGSAHQGCLPPFPADVFMIPQYGYLTLNNGSQAVGRSSFYCLEYFPSQMLRTGNNFQFTYTFEDVPFHSSYAHSQSLDRLMNPLIDQYLYYLSRTQTTGGTANTQTLGFSQGGPNTMANQAKNWLPGPCYRQQRVSTTTGQNNNSNFAWTAGTKYHLNGRNSLANPGIAMATHKDDEERFFPSNGILIFGKQNAARDNADYSDVMLTSEEEIKTTNPVATEEYGIVADNLQQQNTAPQIGTVNSQGALPGMVWQNRDVYLQGPIWAKIPHTDGNFHPSPLMGGFGLKHPPPQILIKNTPVPADPPTTFNQSKLNSFITQYSTGQVSVEIEWELQKENSKRWNPEIQYTSNYNKSVNVDFTVDTNGVYSEPRPIGTRYLTRNL

SEQ ID NO: 46 - protein, 738 aa, artificial sequence
  synthetic polypeptide (Mutant5-AAV2)
MAADGYLPDWLEDNLSEGIREWWALKPGAPKPKANQQKQDDGRGLVLPGYKYLGPFNGLDKGEPVNAADAAALEHDKAYDQQLQAGDNPYLRYNHADAEFQERLQEDTSFGGNLGRAVFQAKKRVLEPLGLVEEGAKTAPGKKRPVEPSPQRSPDSSTGIGKKGQQPARKRLNFGQTGDSESVPDPQPLGEPPAAPSGVGPNTMAAGGGAPMADNNEGADGVGSSSGNWHCDSTWLGDRVITTSTRTWALPTYNNHLYKQISNGTSGGATNDNTYFGYSTPWGYFDFNRFHCHFSPRDWQRLINNNWGFRPKRLSFKLFNIQVKEVTQNEGTKTIANNLTSTIQVFTDSEYQLPYVLGSAHQGCLPPFPADVFMIPQYGYLTLNNGSQAVGRSSFYCLEYFPSQMLRTGNNFQFTYTFEDVPFHSSYAHSQSLDRLMNPLIDQYLYYLSRTNTPSGTTTQSRLQFSQAGASDIRDQSRNWLPGPCYRQQRVSTTTGQNNNSNFAWTAGTKYHLNGRNSLANPGIAMATHKDDEERFFPSNGILIFGKQNAARDNADYSDVMLTSEEEIKTTNPVATEEYGIVADNLQQQNTAPQIGTVNSQGALPGMVWQNRDVYLQGPIWAKIPHTDGNFHPSPLMGGFGLKHPPPQILIKNTPVPADPPTTFNQSKLNSFITQYSTGQVSVEIEWELQKENSKRWNPEIQYTSNYYKSTSVDFAVNTEGVYSEPRPIGTRYLTRNL

SEQ ID NO: 47 - protein, 738 aa, artificial sequence
  synthetic polypeptide (Mutant5-#1704)
MAADGYLPDWLEDNLSEGIREWWALKPGAPKPKANQQKQDDGRGLVLPGYKYLGPFNGLDKGEPVNAADAAALEHDKAYDQQLQAGDNPYLRYNHADAEFQERLQEDTSFGGNLGRAVFQAKKRVLEPLGLVEEGAKTAPGKKRPVEPSPQRSPDSSTGIGKKGQQPARKRLNFGQTGDSESVPDPQPLGEPPAAPSGVGPNTMAAGGGAPMADNNEGADGVGSSSGNWHCDSTWLGDRVITTSTRTWALPTYNNHLYKQISNGTSGGATNDNTYFGYSTPWGYFDFNRFHCHFSPRDWQRLINNNWGFRPKRLSFKLFNIQVKEVTQNEGTKTIANNLTSTIQVFTDSEYQLPYVLGSAHQGCLPPFPADVFMIPQYGYLTLNNGSQAVGRSSFYCLEYFPSQMLRTGNNFQFTYTFEDVPFHSSYAHSQSLDRLMNPLIDQYLYYLNKTQTNSGTLQQSRLLFSQAGPTSMSLQAKNWLPGPCYRQQRVSTTTGQNNNSNFAWTAGTKYHLNGRNSLANPGIAMATHKDDEERFFPSNGILIFGKQNAARDNADYSDVMLTSEEEIKTTNPVATEEYGIVADNLQQQNTAPQIGTVNSQGALPGMVWQNRDVYLQGPIWAKIPHTDGNFHPSPLMGGFGLKHPPPQILIKNTPVPADPPTTFNQSKLNSFITQYSTGQVSVEIEWELQKENSKRWNPEIQYTSNYYKSTSVDFAVNTEGVYSEPRPIGTRYLTRNL

SEQ ID NO: 48 - protein, 738 aa, artificial sequence
  synthetic polypeptide (Mutant5-#3086)
MAADGYLPDWLEDNLSEGIREWWALKPGAPKPKANQQKQDDGRGLVLPGYKYLGPFNGLDKGEPVNAADAAALEHDKAYDQQLQAGDNPYLRYNHADAEFQERLQEDTSFGGNLGRAVFQAKKRVLEPLGLVEEGAKTAPGKKRPVEPSPQRSPDSSTGIGKKGQQPARKRLNFGQTGDSESVPDPQPLGEPPAAPSGVGPNTMAAGGGAPMADNNEGADGVGSSSGNWHCDSTWLGDRVITTSTRTWALPTYNNHLYKQISNGTSGGATNDNTYFGYSTPWGYFDFNRFHCHFSPRDWQRLINNNWGFRPKRLSFKLFNIQVKEVTQNEGTKTIANNLTSTIQVFTDSEYQLPYVLGSAHQGCLPPFPADVFMIPQYGYLTLNNGSQAVGRSSFYCLEYFPSQMLRTGNNFQFTYTFEDVPFHSSYAHSQSLDRLMNPLIDQYLYYLNKTQSNSGTLQQSRLLFSQAGPTNMSLQAKNWLPGPCYRQQRVSTTTGQNNNSNFAWTAGTKYHLNGRNSLANPGIAMATHKDDEERFFPSNGILIFGKQNAARDNADYSDVMLTSEEEIKTTNPVATEEYGIVADNLQQQNTAPQIGTVNSQGALPGMVWQNRDVYLQGPIWAKIPHTDGNFHPSPLMGGFGLKHPPPQILIKNTPVPADPPTTFNQSKLNSFITQYSTGQVSVEIEWELQKENSKRWNPEIQYTSNYYKSTSVDFAVNTEGVYSEPRPIGTRYLTRNL

SEQ ID NO: 49 - protein, 737 aa, artificial sequence
  synthetic polypeptide (Mutant5-#508)
MAADGYLPDWLEDNLSEGIREWWALKPGAPKPKANQQKQDDGRGLVLPGYKYLGPFNGLDKGEPVNAADAAALEHDKAYDQQLQAGDNPYLRYNHADAEFQERLQEDTSFGGNLGRAVFQAKKRVLEPLGLVEEGAKTAPGKKRPVEPSPQRSPDSSTGIGKKGQQPARKRLNFGQTGDSESVPDPQPLGEPPAAPSGVGPNTMAAGGGAPMADNNEGADGVGSSSGNWHCDSTWLGDRVITTSTRTWALPTYNNHLYKQISNGTSGGATNDNTYFGYSTPWGYFDFNRFHCHFSPRDWQRLINNNWGFRPKRLSFKLFNIQVKEVTQNEGTKTIANNLTSTIQVFTDSEYQLPYVLGSAHQGCLPPFPADVFMIPQYGYLTLNNGSQAVGRSSFYCLEYFPSQMLRTGNNFQFTYTFEDVPFHSSYAHSQSLDRLMNPLIDQYLYYLNRTQTASGTQQSRLLFSQAGPTSMSLQAKNWLPGPCYRQQRVSTTTGQNNNSNFAWTAGTKYHLNGRNSLANPGIAMATHKDDEERFFPSNGILIFGKQNAARDNADYSDVMLTSEEEIKTTNPVATEEYGIVADNLQQQNTAPQIGTVNSQGALPGMVWQNRDVYLQGPIWAKIPHTDGNFHPSPLMGGFGLKHPPPQILIKNTPVPADPPTTFNQSKLNSFITQYSTGQVSVEIEWELQKENSKRWNPEIQYTSNYYKSTSVDFAVNTEGVYSEPRPIGTRYLTRNL

SEQ ID NO: 50 - protein, 738 aa, artificial sequence
  synthetic polypeptide (Mutant5-#3142)
MAADGYLPDWLEDNLSEGIREWWALKPGAPKPKANQQKQDDGRGLVLPGYKYLGPFNGLDKGEPVNAADAAALEHDKAYDQQLQAGDNPYLRYNHADAEFQERLQEDTSFGGNLGRAVFQAKKRVLEPLGLVEEGAKTAPGKKRPVEPSPQRSPDSSTGIGKKGQQPARKRLNFGQTGDSESVPDPQPLGEPPAAPSGVGPNTMAAGGGAPMADNNEGADGVGSSSGNWHCDSTWLGDRVITTSTRTWALPTYNNHLYKQISNGTSGGATNDNTYFGYSTPWGYFDFNRFHCHFSPRDWQRLINNNWGFRPKRLSFKLFNIQVKEVTQNEGTKTIANNLTSTIQVFTDSEYQLPYVLGSAHQGCLPPFPADVFMIPQYGYLTLNNGSQAVGRSSFYCLEYFPSQMLRTGNNFQFTYTFEDVPFHSSYAHSQSLDRLMNPLIDQYLYYLNKTQSNSGTVQQSRLLFSQAGPTSMSLQAKNWLPGPCYRQQRVSTTTGQNNNSNFAWTAGTKYHLNGRNSLANPGIAMATHKDDEERFFPSNGILIFGKQNAARDNADYSDVMLTSEEEIKTTNPVATEEYGIVADNLQQQNTAPQIGTVNSQGALPGMVWQNRDVYLQGPIWAKIPHTDGNFHPSPLMGGFGLKHPPPQILIKNTPVPADPPTTFNQSKLNSFITQYSTGQVSVEIEWELQKENSKRWNPEIQYTSNYYKSTSVDFAVNTEGVYSEPRPIGTRYLTRNL

SEQ ID NO: 51 - protein, 738 aa, artificial sequence
  synthetic polypeptide (Mutant5-#M258)
MAADGYLPDWLEDNLSEGIREWWALKPGAPKPKANQQKQDDGRGLVLPGYKYLGPFNGLDKGEPVNAADAAALEHDKAYDQQLQAGDNPYLRYNHADAEFQERLQEDTSFGGNLGRAVFQAKKRVLEPLGLVEEGAKTAPGKKRPVEPSPQRSPDSSTGIGKKGQQPARKRLNFGQTGDSESVPDPQPLGEPPAAPSGVGPNTMAAGGGAPMADNNEGADGVGSSSGNWHCDSTWLGDRVITTSTRTWALPTYNNHLYKQISNGTSGGATNDNTYFGYSTPWGYFDFNRFHCHFSPRDWQRLINNNWGFRPKRLSFKLFNIQVKEVTQNEGTKTIANNLTSTIQVFTDSEYQLPYVLGSAHQGCLPPFPADVFMIPQYGYLTLNNGSQAVGRSSFYCLEYFPSQMLRTGNNFQFTYTFEDVPFHSSYAHSQSLDRLMNPLIDQYLYYLNKTQSASGTVQQSRLLFSQAGPTSMSLQAKNWLPGPCYRQQRVSTTTGQNNNSNFAWTAGTKYHLNGRNSLANPGIAMATHKDDEERFFPSNGILIFGKQNAARDNADYSDVMLTSEEEIKTTNPVATEEYGIVADNLQQQNTAPQIGTVNSQGALPGMVWQNRDVYLQGPIWAKIPHTDGNFHPSPLMGGFGLKHPPPQILIKNTPVPADPPTTFNQSKLNSFITQYSTGQVSVEIEWELQKENSKRWNPEIQYTSNYYKSTSVDFAVNTEGVYSEPRPIGTRYLTRNL

SEQ ID NO: 52 - protein, 738 aa, artificial sequence
  synthetic polypeptide (Mutant5-#1570)
MAADGYLPDWLEDNLSEGIREWWALKPGAPKPKANQQKQDDGRGLVLPGYKYLGPFNGLDKGEPVNAADAAALEHDKAYDQQLQAGDNPYLRYNHADAEFQERLQEDTSFGGNLGRAVFQAKKRVLEPLGLVEEGAKTAPGKKRPVEPSPQRSPDSSTGIGKKGQQPARKRLNFGQTGDSESVPDPQPLGEPPAAPSGVGPNTMAAGGGAPMADNNEGADGVGSSSGNWHCDSTWLGDRVITTSTRTWALPTYNNHLYKQISNGTSGGATNDNTYFGYSTPWGYFDFNRFHCHFSPRDWQRLINNNWGFRPKRLSFKLFNIQVKEVTQNEGTKTIANNLTSTIQVFTDSEYQLPYVLGSAHQGCLPPFPADVFMIPQYGYLTLNNGSQAVGRSSFYCLEYFPSQMLRTGNNFQFTYTFEDVPFHSSYAHSQSLDRLMNPLIDQYLYYLNKTQANSGTLQQSRLLFSQAGPTSMSLQAKNWLPGPCYRQQRVSTTTGQNNNSNFAWTAGTKYHLNGRNSLANPGIAMATHKDDEERFFPSNGILIFGKQNAARDNADYSDVMLTSEEEIKTTNPVATEEYGIVADNLQQQNTAPQIGTVNSQGALPGMVWQNRDVYLQGPIWAKIPHTDGNFHPSPLMGGFGLKHPPPQILIKNTPVPADPPTTFNQSKLNSFITQYSTGQVSVEIEWELQKENSKRWNPEIQYTSNYYKSTSVDFAVNTEGVYSEPRPIGTRYLTRNL

SEQ ID NO: 53 - protein, 737 aa, artificial sequence
  synthetic polypeptide (Mutant5-#2731)
AADGYLPDWLEDNLSEGIREWWALKPGAPKPKANQQKQDDGRGLVLPGYKYLGPFNGLDKGEPVNAADAAALEHDKAYDQQLQAGDNPYLRYNHADAEFQERLQEDTSFGGNLGRAVFQAKKRVLEPLGLVEEGAKTAPGKKRPVEPSPQRSPDSSTGIGKKGQQPARKRLNFGQTGDSESVPDPQPLGEPPAAPSGVGPNTMAAGGGAPMADNNEGADGVGSSSGNWHCDSTWLGDRVITTSTRTWALPTYNNHLYKQISNGTSGGATNDNTYFGYSTPWGYFDFNRFHCHFSPRDWQRLINNNWGFRPKRLSFKLFNIQVKEVTQNEGTKTIANNLTSTIQVFTDSEYQLPYVLGSAHQGCLPPFPADVFMIPQYGYLTLNNGSQAVGRSSFYCLEYFPSQMLRTGNNFQFTYTFEDVPFHSSYAHSQSLDRLMNPLIDQYLYYLNKTQSNSGTTTMSRLLFSQAGPTSMSLHAKNWLPGPCYRQQRVSTTTGQNNNSNFAWTAGTKYHLNGRNSLANPGIAMATHKDDEERFFPSNGILIFGKQNAARDNADYSDVMLTSEEEIKTTNPVATEEYGIVADNLQQQNTAPQIGTVNSQGALPGMVWQNRDVYLQGPIWAKIPHTDGNFHPSPLMGGFGLKHPPPQILIKNTPVPADPPTTFNQSKLNSFITQYSTGQVSVEIEWELQKENSKRWNPEIQYTSNYYKSTSVDFAVNTEGVYSEPRPIGTRYLTRNL

SEQ ID NO: 54 - protein, 738 aa, artificial sequence
  synthetic polypeptide (Mutant5-#1602)
MAADGYLPDWLEDNLSEGIREWWALKPGAPKPKANQQKQDDGRGLVLPGYKYLGPFNGLDKGEPVNAADAAALEHDKAYDQQLQAGDNPYLRYNHADAEFQERLQEDTSFGGNLGRAVFQAKKRVLEPLGLVEEGAKTAPGKKRPVEPSPQRSPDSSTGIGKKGQQPARKRLNFGQTGDSESVPDPQPLGEPPAAPSGVGPNTMAAGGGAPMADNNEGADGVGSSSGNWHCDSTWLGDRVITTSTRTWALPTYNNHLYKQISNGTSGGATNDNTYFGYSTPWGYFDFNRFHCHFSPRDWQRLINNNWGFRPKRLSFKLFNIQVKEVTQNEGTKTIANNLTSTIQVFTDSEYQLPYVLGSAHQGCLPPFPADVFMIPQYGYLTLNNGSQAVGRSSFYCLEYFPSQMLRTGNNFQFTYTFEDVPFHSSYAHSQSLDRLMNPLIDQYLYYLNKTQTNSGTLQQSRLLFSQAGPTNMSLQAKNWLPGPCYRQQRVSTTTGQNNNSNFAWTAGTKYHLNGRNSLANPGIAMATHKDDEERFFPSNGILIFGKQNAARDNADYSDVMLTSEEEIKTTNPVATEEYGIVADNLQQQNTAPQIGTVNSQGALPGMVWQNRDVYLQGPIWAKIPHTDGNFHPSPLMGGFGLKHPPPQILIKNTPVPADPPTTFNQSKLNSFITQYSTGQVSVEIEWELQKENSKRWNPEIQYTSNYYKSTSVDFAVNTEGVYSEPRPIGTRYLTRNL

SEQ ID NO: 55 - protein, 738 aa, artificial sequence
  synthetic polypeptide (Mutant5-#667)
MAADGYLPDWLEDNLSEGIREWWALKPGAPKPKANQQKQDDGRGLVLPGYKYLGPFNGLDKGEPVNAADAAALEHDKAYDQQLQAGDNPYLRYNHADAEFQERLQEDTSFGGNLGRAVFQAKKRVLEPLGLVEEGAKTAPGKKRPVEPSPQRSPDSSTGIGKKGQQPARKRLNFGQTGDSESVPDPQPLGEPPAAPSGVGPNTMAAGGGAPMADNNEGADGVGSSSGNWHCDSTWLGDRVITTSTRTWALPTYNNHLYKQISNGTSGGATNDNTYFGYSTPWGYFDFNRFHCHFSPRDWQRLINNNWGFRPKRLSFKLFNIQVKEVTQNEGTKTIANNLTSTIQVFTDSEYQLPYVLGSAHQGCLPPFPADVFMIPQYGYLTLNNGSQAVGRSSFYCLEYFPSQMLRTGNNFQFTYTFEDVPFHSSYAHSQSLDRLMNPLIDQYLYYLSRTNTPSGTTTQSRLLFSQAGPTSMSLQAKNWLPGPCYRQQRVSTTTGQNNNSNFAWTAGTKYHLNGRNSLANPGIAMATHKDDEERFFPSNGILIFGKQNAARDNADYSDVMLTSEEEIKTTNPVATEEYGIVADNLQQQNTAPQIGTVNSQGALPGMVWQNRDVYLQGPIWAKIPHTDGNFHPSPLMGGFGLKHPPPQILIKNTPVPADPPTTFNQSKLNSFITQYSTGQVSVEIEWELQKENSKRWNPEIQYTSNYYKSTSVDFAVNTEGVYSEPRPIGTRYLTRNL

SEQ ID NO: 56 - protein, 738 aa, artificial sequence
  synthetic polypeptide (Mutant5-#129)
MAADGYLPDWLEDNLSEGIREWWALKPGAPKPKANQQKQDDGRGLVLPGYKYLGPFNGLDKGEPVNAADAAALEHDKAYDQQLQAGDNPYLRYNHADAEFQERLQEDTSFGGNLGRAVFQAKKRVLEPLGLVEEGAKTAPGKKRPVEPSPQRSPDSSTGIGKKGQQPARKRLNFGQTGDSESVPDPQPLGEPPAAPSGVGPNTMAAGGGAPMADNNEGADGVGSSSGNWHCDSTWLGDRVITTSTRTWALPTYNNHLYKQISNGTSGGATNDNTYFGYSTPWGYFDFNRFHCHFSPRDWQRLINNNWGFRPKRLSFKLFNIQVKEVTQNEGTKTIANNLTSTIQVFTDSEYQLPYVLGSAHQGCLPPFPADVFMIPQYGYLTLNNGSQAVGRSSFYCLEYFPSQMLRTGNNFQFTYTFEDVPFHSSYAHSQSLDRLMNPLIDQYLYYLNRTQTTSGTPTQSRLLFSQAGPTSMSLQAKNWLPGPCYRQQRVSTTTGQNNNSNFAWTAGTKYHLNGRNSLANPGIAMATHKDDEERFFPSNGILIFGKQNAARDNADYSDVMLTSEEEIKTTNPVATEEYGIVADNLQQQNTAPQIGTVNSQGALPGMVWQNRDVYLQGPIWAKIPHTDGNFHPSPLMGGFGLKHPPPQILIKNTPVPADPPTTFNQSKLNSFITQYSTGQVSVEIEWELQKENSKRWNPEIQYTSNYYKSTSVDFAVNTEGVYSEPRPIGTRYLTRNL

SEQ ID NO: 57 - protein, 737 aa, artificial sequence
  synthetic polypeptide (Mutant5-#767)
MAADGYLPDWLEDNLSEGIREWWALKPGAPKPKANQQKQDDGRGLVLPGYKYLGPFNGLDKGEPVNAADAAALEHDKAYDQQLQAGDNPYLRYNHADAEFQERLQEDTSFGGNLGRAVFQAKKRVLEPLGLVEEGAKTAPGKKRPVEPSPQRSPDSSTGIGKKGQQPARKRLNFGQTGDSESVPDPQPLGEPPAAPSGVGPNTMAAGGGAPMADNNEGADGVGSSSGNWHCDSTWLGDRVITTSTRTWALPTYNNHLYKQISNGTSGGATNDNTYFGYSTPWGYFDFNRFHCHFSPRDWQRLINNNWGFRPKRLSFKLFNIQVKEVTQNEGTKTIANNLTSTIQVFTDSEYQLPYVLGSAHQGCLPPFPADVFMIPQYGYLTLNNGSQAVGRSSFYCLEYFPSQMLRTGNNFQFTYTFEDVPFHSSYAHSQSLDRLMNPLIDQYLYYLNKTQSSGTLQQSRLLFSQAGPTSMSLQARNWLPGPCYRQQRVSTTTGQNNNSNFAWTAGTKYHLNGRNSLANPGIAMATHKDDEERFFPSNGILIFGKQNAARDNADYSDVMLTSEEEIKTTNPVATEEYGIVADNLQQQNTAPQIGTVNSQGALPGMVWQNRDVYLQGPIWAKIPHTDGNFHPSPLMGGFGLKHPPPQILIKNTPVPADPPTTFNQSKLNSFITQYSTGQVSVEIEWELQKENSKRWNPEIQYTSNYYKSTSVDFAVNTEGVYSEPRPIGTRYLTRNL

SEQ ID NO: 58 - protein, 737 aa, artificial sequence
  synthetic polypeptide (Mutant4-AAV13)
MAADGYLPDWLEDNLSEGIREWWALKPGAPKPKANQQKQDDGRGLVLPGYKYLGPFNGLDKGEPVNAADAAALEHDKAYDQQLQAGDNPYLRYNHADAEFQERLQEDTSFGGNLGRAVFQAKKRVLEPLGLVEEGAKTAPGKKRPVEPSPQRSPDSSTGIGKKGQQPARKRLNFGQTGDSESVPDPQPLGEPPAAPSGVGPNTMAAGGGAPMADNNEGADGVGSSSGNWHCDSTWLGDRVITTSTRTWALPTYNNHLYKQISNGTSGGATNDNTYFGYSTPWGYFDFNRFHCHFSPRDWQRLINNNWGFRPKRLSFKLFNIQVKEVTQNEGTKTIANNLTSTIQVFTDSEYQLPYVLGSAHQGCLPPFPADVFMIPQYGYLTLNNGSQAVGRSSFYCLEYFPSQMLRTGNNFQFTYTFEDVPFHSSYAHSQSLDRLMNPLIDQYLYYLNRTQTASGTQQSRLLFSQAGPTSMSLQAKNWLPGPCYRQQRLSKQANDNNNSNFPWTGATKYHLNGRDSLVNPGPAMASHKDDEERFFPSNGILIFGKQNAARDNADYSDVMLTSEEEIKTTNPVATEEYGIVADNLQQQNTAPQIGTVNSQGALPGMVWQNRDVYLQGPIWAKIPHTDGNFHPSPLMGGFGLKHPPPQILIKNTPVPADPPTTFNQSKLNSFITQYSTGQVSVEIEWELQKENSKRWNPEIQYTSNYYKSTSVDFAVNTEGVYSEPRPIGTRYLTRNL

SEQ ID NO: 59 - protein, 738 aa, artificial sequence
  synthetic polypeptide (Mutant4-AAV2)
MAADGYLPDWLEDNLSEGIREWWALKPGAPKPKANQQKQDDGRGLVLPGYKYLGPFNGLDKGEPVNAADAAALEHDKAYDQQLQAGDNPYLRYNHADAEFQERLQEDTSFGGNLGRAVFQAKKRVLEPLGLVEEGAKTAPGKKRPVEPSPQRSPDSSTGIGKKGQQPARKRLNFGQTGDSESVPDPQPLGEPPAAPSGVGPNTMAAGGGAPMADNNEGADGVGSSSGNWHCDSTWLGDRVITTSTRTWALPTYNNHLYKQISNGTSGGATNDNTYFGYSTPWGYFDFNRFHCHFSPRDWQRLINNNWGFRPKRLSFKLFNIQVKEVTQNEGTKTIANNLTSTIQVFTDSEYQLPYVLGSAHQGCLPPFPADVFMIPQYGYLTLNNGSQAVGRSSFYCLEYFPSQMLRTGNNFQFTYTFEDVPFHSSYAHSQSLDRLMNPLIDQYLYYLSRTNTPSGTTTQSRLQFSQAGASDIRDQSRNWLPGPCYRQQRVSKTSADNNNSEYSWTGATKYHLNGRDSLVNPGPAMASHKDDEERFFPSNGILIFGKQNAARDNADYSDVMLTSEEEIKTTNPVATEEYGIVADNLQQQNTAPQIGTVNSQGALPGMVWQNRDVYLQGPIWAKIPHTDGNFHPSPLMGGFGLKHPPPQILIKNTPVPADPPTTFNQSKLNSFITQYSTGQVSVEIEWELQKENSKRWNPEIQYTSNYYKSTSVDFAVNTEGVYSEPRPIGTRYLTRNL

SEQ ID NO: 60 - protein, 738 aa, artificial sequence
  synthetic polypeptide (Mutant4-1704)
MAADGYLPDWLEDNLSEGIREWWALKPGAPKPKANQQKQDDGRGLVLPGYKYLGPFNGLDKGEPVNAADAAALEHDKAYDQQLQAGDNPYLRYNHADAEFQERLQEDTSFGGNLGRAVFQAKKRVLEPLGLVEEGAKTAPGKKRPVEPSPQRSPDSSTGIGKKGQQPARKRLNFGQTGDSESVPDPQPLGEPPAAPSGVGPNTMAAGGGAPMADNNEGADGVGSSSGNWHCDSTWLGDRVITTSTRTWALPTYNNHLYKQISNGTSGGATNDNTYFGYSTPWGYFDFNRFHCHFSPRDWQRLINNNWGFRPKRLSFKLFNIQVKEVTQNEGTKTIANNLTSTIQVFTDSEYQLPYVLGSAHQGCLPPFPADVFMIPQYGYLTLNNGSQAVGRSSFYCLEYFPSQMLRTGNNFQFTYTFEDVPFHSSYAHSQSLDRLMNPLIDQYLYYLNKTQTNSGTLQQSRLLFSQAGPTSMSLQAKNWLPGPCYRQQRLSKQANDNNNSNFPWTAATKYHLNGRDSLVNPGPAMASHKDDEERFFPSNGILIFGKQNAARDNADYSDVMLTSEEEIKTTNPVATEEYGIVADNLQQQNTAPQIGTVNSQGALPGMVWQNRDVYLQGPIWAKIPHTDGNFHPSPLMGGFGLKHPPPQILIKNTPVPADPPTTFNQSKLNSFITQYSTGQVSVEIEWELQKENSKRWNPEIQYTSNYYKSTSVDFAVNTEGVYSEPRPIGTRYLTRNL

SEQ ID NO: 61 - protein, 738 aa, artificial sequence
  synthetic polypeptide (Mutant4-3086)
MAADGYLPDWLEDNLSEGIREWWALKPGAPKPKANQQKQDDGRGLVLPGYKYLGPFNGLDKGEPVNAADAAALEHDKAYDQQLQAGDNPYLRYNHADAEFQERLQEDTSFGGNLGRAVFQAKKRVLEPLGLVEEGAKTAPGKKRPVEPSPQRSPDSSTGIGKKGQQPARKRLNFGQTGDSESVPDPQPLGEPPAAPSGVGPNTMAAGGGAPMADNNEGADGVGSSSGNWHCDSTWLGDRVITTSTRTWALPTYNNHLYKQISNGTSGGATNDNTYFGYSTPWGYFDFNRFHCHFSPRDWQRLINNNWGFRPKRLSFKLFNIQVKEVTQNEGTKTIANNLTSTIQVFTDSEYQLPYVLGSAHQGCLPPFPADVFMIPQYGYLTLNNGSQAVGRSSFYCLEYFPSQMLRTGNNFQFTYTFEDVPFHSSYAHSQSLDRLMNPLIDQYLYYLNKTQSNSGTLQQSRLLFSQAGPTNMSLQAKNWLPGPCYRQQRLSKQANDNNNSNFPWTAATKYHLNGRDSLVNPGPAMASHKDDEERFFPSNGILIFGKQNAARDNADYSDVMLTSEEEIKTTNPVATEEYGIVADNLQQQNTAPQIGTVNSQGALPGMVWQNRDVYLQGPIWAKIPHTDGNFHPSPLMGGFGLKHPPPQILIKNTPVPADPPTTFNQSKLNSFITQYSTGQVSVEIEWELQKENSKRWNPEIQYTSNYYKSTSVDFAVNTEGVYSEPRPIGTRYLTRNL

SEQ ID NO: 62 - protein, 737 aa, artificial sequence
  synthetic polypeptide (Mutant4-1024)
MAADGYLPDWLEDNLSEGIREWWALKPGAPKPKANQQKQDDGRGLVLPGYKYLGPFNGLDKGEPVNAADAAALEHDKAYDQQLQAGDNPYLRYNHADAEFQERLQEDTSFGGNLGRAVFQAKKRVLEPLGLVEEGAKTAPGKKRPVEPSPQRSPDSSTGIGKKGQQPARKRLNFGQTGDSESVPDPQPLGEPPAAPSGVGPNTMAAGGGAPMADNNEGADGVGSSSGNWHCDSTWLGDRVITTSTRTWALPTYNNHLYKQISNGTSGGATNDNTYFGYSTPWGYFDFNRFHCHFSPRDWQRLINNNWGFRPKRLSFKLFNIQVKEVTQNEGTKTIANNLTSTIQVFTDSEYQLPYVLGSAHQGCLPPFPADVFMIPQYGYLTLNNGSQAVGRSSFYCLEYFPSQMLRTGNNFQFTYTFEDVPFHSSYAHSQSLDRLMNPLIDQYLYYLNRTQTASGTQQSRLLFSQAGPTSMSLQAKNWLPGPCYRQQRLSKQANDNNNSNFPWTAATKYHLNGRDSLVNPGPAMASHKDDEERFFPSNGILIFGKQNAARDNADYSDVMLTSEEEIKTTNPVATEEYGIVADNLQQQNTAPQIGTVNSQGALPGMVWQNRDVYLQGPIWAKIPHTDGNFHPSPLMGGFGLKHPPPQILIKNTPVPADPPTTFNQSKLNSFITQYSTGQVSVEIEWELQKENSKRWNPEIQYTSNYYKSTSVDFAVNTEGVYSEPRPIGTRYLTRNL

SEQ ID NO: 63 - protein, 737 aa, artificial sequence
  synthetic polypeptide (Mutant4-508)
MAADGYLPDWLEDNLSEGIREWWALKPGAPKPKANQQKQDDGRGLVLPGYKYLGPFNGLDKGEPVNAADAAALEHDKAYDQQLQAGDNPYLRYNHADAEFQERLQEDTSFGGNLGRAVFQAKKRVLEPLGLVEEGAKTAPGKKRPVEPSPQRSPDSSTGIGKKGQQPARKRLNFGQTGDSESVPDPQPLGEPPAAPSGVGPNTMAAGGGAPMADNNEGADGVGSSSGNWHCDSTWLGDRVITTSTRTWALPTYNNHLYKQISNGTSGGATNDNTYFGYSTPWGYFDFNRFHCHFSPRDWQRLINNNWGFRPKRLSFKLFNIQVKEVTQNEGTKTIANNLTSTIQVFTDSEYQLPYVLGSAHQGCLPPFPADVFMIPQYGYLTLNNGSQAVGRSSFYCLEYFPSQMLRTGNNFQFTYTFEDVPFHSSYAHSQSLDRLMNPLIDQYLYYLNRTQTASGTQQSRLLFSQAGPTSMSLQAKNWLPGPCYRQQRLSKQANDNNNSNYSWTGATKYHLNGRDSLVNPGPAMASHKDDEERFFPSNGILIFGKQNAARDNADYSDVMLTSEEEIKTTNPVATEEYGIVADNLQQQNTAPQIGTVNSQGALPGMVWQNRDVYLQGPIWAKIPHTDGNFHPSPLMGGFGLKHPPPQILIKNTPVPADPPTTFNQSKLNSFITQYSTGQVSVEIEWELQKENSKRWNPEIQYTSNYYKSTSVDFAVNTEGVYSEPRPIGTRYLTRNL

SEQ ID NO: 64 - protein, 737 aa, artificial sequence
  synthetic polypeptide (Mutant4-3142)
AADGYLPDWLEDNLSEGIREWWALKPGAPKPKANQQKQDDGRGLVLPGYKYLGPFNGLDKGEPVNAADAAALEHDKAYDQQLQAGDNPYLRYNHADAEFQERLQEDTSFGGNLGRAVFQAKKRVLEPLGLVEEGAKTAPGKKRPVEPSPQRSPDSSTGIGKKGQQPARKRLNFGQTGDSESVPDPQPLGEPPAAPSGVGPNTMAAGGGAPMADNNEGADGVGSSSGNWHCDSTWLGDRVITTSTRTWALPTYNNHLYKQISNGTSGGATNDNTYFGYSTPWGYFDFNRFHCHFSPRDWQRLINNNWGFRPKRLSFKLFNIQVKEVTQNEGTKTIANNLTSTIQVFTDSEYQLPYVLGSAHQGCLPPFPADVFMIPQYGYLTLNNGSQAVGRSSFYCLEYFPSQMLRTGNNFQFTYTFEDVPFHSSYAHSQSLDRLMNPLIDQYLYYLNKTQSNSGTVQQSRLLFSQAGPTSMSLQAKNWLPGPCYRQQRLSKQASDNNNSNFPWTAATKYHLNGRDSLVNPGPAMASHKDDEERFFPSNGILIFGKQNAARDNADYSDVMLTSEEEIKTTNPVATEEYGIVADNLQQQNTAPQIGTVNSQGALPGMVWQNRDVYLQGPIWAKIPHTDGNFHPSPLMGGFGLKHPPPQILIKNTPVPADPPTTFNQSKLNSFITQYSTGQVSVEIEWELQKENSKRWNPEIQYTSNYYKSTSVDFAVNTEGVYSEPRPIGTRYLTRNL

SEQ ID NO: 65 - protein, 738 aa, artificial sequence
  synthetic polypeptide (Mutant4-2320)
MAADGYLPDWLEDNLSEGIREWWALKPGAPKPKANQQKQDDGRGLVLPGYKYLGPFNGLDKGEPVNAADAAALEHDKAYDQQLQAGDNPYLRYNHADAEFQERLQEDTSFGGNLGRAVFQAKKRVLEPLGLVEEGAKTAPGKKRPVEPSPQRSPDSSTGIGKKGQQPARKRLNFGQTGDSESVPDPQPLGEPPAAPSGVGPNTMAAGGGAPMADNNEGADGVGSSSGNWHCDSTWLGDRVITTSTRTWALPTYNNHLYKQISNGTSGGATNDNTYFGYSTPWGYFDFNRFHCHFSPRDWQRLINNNWGFRPKRLSFKLFNIQVKEVTQNEGTKTIANNLTSTIQVFTDSEYQLPYVLGSAHQGCLPPFPADVFMIPQYGYLTLNNGSQAVGRSSFYCLEYFPSQMLRTGNNFQFTYTFEDVPFHSSYAHSQSLDRLMNPLIDQYLYYLNKTQSNSGTLQQSRLLFSQAGPTSMSLQAKNWLPGPCYRQQRLSKQATDNNNSEFPWTAATKYHLNGRDSLVNPGPAMASHKDDEERFFPSNGILIFGKQNAARDNADYSDVMLTSEEEIKTTNPVATEEYGIVADNLQQQNTAPQIGTVNSQGALPGMVWQNRDVYLQGPIWAKIPHTDGNFHPSPLMGGFGLKHPPPQILIKNTPVPADPPTTFNQSKLNSFITQYSTGQVSVEIEWELQKENSKRWNPEIQYTSNYYKSTSVDFAVNTEGVYSEPRPIGTRYLTRNL

SEQ ID NO: 66 - protein, 738 aa, artificial sequence
  synthetic polypeptide (Mutant4-1010)
MAADGYLPDWLEDNLSEGIREWWALKPGAPKPKANQQKQDDGRGLVLPGYKYLGPFNGLDKGEPVNAADAAALEHDKAYDQQLQAGDNPYLRYNHADAEFQERLQEDTSFGGNLGRAVFQAKKRVLEPLGLVEEGAKTAPGKKRPVEPSPQRSPDSSTGIGKKGQQPARKRLNFGQTGDSESVPDPQPLGEPPAAPSGVGPNTMAAGGGAPMADNNEGADGVGSSSGNWHCDSTWLGDRVITTSTRTWALPTYNNHLYKQISNGTSGGATNDNTYFGYSTPWGYFDFNRFHCHFSPRDWQRLINNNWGFRPKRLSFKLFNIQVKEVTQNEGTKTIANNLTSTIQVFTDSEYQLPYVLGSAHQGCLPPFPADVFMIPQYGYLTLNNGSQAVGRSSFYCLEYFPSQMLRTGNNFQFTYTFEDVPFHSSYAHSQSLDRLMNPLIDQYLYYLNKTQSNSGTLQQSRLLFSQAGPTSMSLQAKNWLPGPCYRQQRVSKTSADNNNSEYSWTGATKYHLNGRDSLVNPGPAMASHKDDEERFFPSNGILIFGKQNAARDNADYSDVMLTSEEEIKTTNPVATEEYGIVADNLQQQNTAPQIGTVNSQGALPGMVWQNRDVYLQGPIWAKIPHTDGNFHPSPLMGGFGLKHPPPQILIKNTPVPADPPTTFNQSKLNSFITQYSTGQVSVEIEWELQKENSKRWNPEIQYTSNYYKSTSVDFAVNTEGVYSEPRPIGTRYLTRNL

SEQ ID NO: 67 - protein, 738 aa, artificial sequence
  synthetic polypeptide (Mutant4-M258)
MAADGYLPDWLEDNLSEGIREWWALKPGAPKPKANQQKQDDGRGLVLPGYKYLGPFNGLDKGEPVNAADAAALEHDKAYDQQLQAGDNPYLRYNHADAEFQERLQEDTSFGGNLGRAVFQAKKRVLEPLGLVEEGAKTAPGKKRPVEPSPQRSPDSSTGIGKKGQQPARKRLNFGQTGDSESVPDPQPLGEPPAAPSGVGPNTMAAGGGAPMADNNEGADGVGSSSGNWHCDSTWLGDRVITTSTRTWALPTYNNHLYKQISNGTSGGATNDNTYFGYSTPWGYFDFNRFHCHFSPRDWQRLINNNWGFRPKRLSFKLFNIQVKEVTQNEGTKTIANNLTSTIQVFTDSEYQLPYVLGSAHQGCLPPFPADVFMIPQYGYLTLNNGSQAVGRSSFYCLEYFPSQMLRTGNNFQFTYTFEDVPFHSSYAHSQSLDRLMNPLIDQYLYYLNKTQSASGTVQQSRLLFSQAGPTSMSLQAKNWLPGPCYRQQRLSKQANENNNSNFPWTAATKYHLNGRDSLVNPGPAMASHKDDEERFFPSNGILIFGKQNAARDNADYSDVMLTSEEEIKTTNPVATEEYGIVADNLQQQNTAPQIGTVNSQGALPGMVWQNRDVYLQGPIWAKIPHTDGNFHPSPLMGGFGLKHPPPQILIKNTPVPADPPTTFNQSKLNSFITQYSTGQVSVEIEWELQKENSKRWNPEIQYTSNYYKSTSVDFAVNTEGVYSEPRPIGTRYLTRNL

SEQ ID NO: 68 - protein, 738 aa, artificial sequence
  synthetic polypeptide (Mutant4-1570)
MAADGYLPDWLEDNLSEGIREWWALKPGAPKPKANQQKQDDGRGLVLPGYKYLGPFNGLDKGEPVNAADAAALEHDKAYDQQLQAGDNPYLRYNHADAEFQERLQEDTSFGGNLGRAVFQAKKRVLEPLGLVEEGAKTAPGKKRPVEPSPQRSPDSSTGIGKKGQQPARKRLNFGQTGDSESVPDPQPLGEPPAAPSGVGPNTMAAGGGAPMADNNEGADGVGSSSGNWHCDSTWLGDRVITTSTRTWALPTYNNHLYKQISNGTSGGATNDNTYFGYSTPWGYFDFNRFHCHFSPRDWQRLINNNWGFRPKRLSFKLFNIQVKEVTQNEGTKTIANNLTSTIQVFTDSEYQLPYVLGSAHQGCLPPFPADVFMIPQYGYLTLNNGSQAVGRSSFYCLEYFPSQMLRTGNNFQFTYTFEDVPFHSSYAHSQSLDRLMNPLIDQYLYYLNKTQANSGTLQQSRLLFSQAGPTSMSLQAKNWLPGPCYRQQRLSKQANDNNNSNFPWTAATKYHLNGRDSLVNPGPAMASHKDDEERFFPSNGILIFGKQNAARDNADYSDVMLTSEEEIKTTNPVATEEYGIVADNLQQQNTAPQIGTVNSQGALPGMVWQNRDVYLQGPIWAKIPHTDGNFHPSPLMGGFGLKHPPPQILIKNTPVPADPPTTFNQSKLNSFITQYSTGQVSVEIEWELQKENSKRWNPEIQYTSNYYKSTSVDFAVNTEGVYSEPRPIGTRYLTRNL

SEQ ID NO: 69 - protein, 738 aa, artificial sequence
  synthetic polypeptide (Mutant4-1602)
MAADGYLPDWLEDNLSEGIREWWALKPGAPKPKANQQKQDDGRGLVLPGYKYLGPFNGLDKGEPVNAADAAALEHDKAYDQQLQAGDNPYLRYNHADAEFQERLQEDTSFGGNLGRAVFQAKKRVLEPLGLVEEGAKTAPGKKRPVEPSPQRSPDSSTGIGKKGQQPARKRLNFGQTGDSESVPDPQPLGEPPAAPSGVGPNTMAAGGGAPMADNNEGADGVGSSSGNWHCDSTWLGDRVITTSTRTWALPTYNNHLYKQISNGTSGGATNDNTYFGYSTPWGYFDFNRFHCHFSPRDWQRLINNNWGFRPKRLSFKLFNIQVKEVTQNEGTKTIANNLTSTIQVFTDSEYQLPYVLGSAHQGCLPPFPADVFMIPQYGYLTLNNGSQAVGRSSFYCLEYFPSQMLRTGNNFQFTYTFEDVPFHSSYAHSQSLDRLMNPLIDQYLYYLNKTQTNSGTLQQSRLLFSQAGPTNMSLQAKNWLPGPCYRQQRLSKQANDNNNSNFPWTAATKYHLNGRDSLVNPGPAMASHKDDEERFFPSNGILIFGKQNAARDNADYSDVMLTSEEEIKTTNPVATEEYGIVADNLQQQNTAPQIGTVNSQGALPGMVWQNRDVYLQGPIWAKIPHTDGNFHPSPLMGGFGLKHPPPQILIKNTPVPADPPTTFNQSKLNSFITQYSTGQVSVEIEWELQKENSKRWNPEIQYTSNYYKSTSVDFAVNTEGVYSEPRPIGTRYLTRNL

SEQ ID NO: 70 - protein, 738 aa, artificial sequence
  synthetic polypeptide (Mutant4-667)
MAADGYLPDWLEDNLSEGIREWWALKPGAPKPKANQQKQDDGRGLVLPGYKYLGPFNGLDKGEPVNAADAAALEHDKAYDQQLQAGDNPYLRYNHADAEFQERLQEDTSFGGNLGRAVFQAKKRVLEPLGLVEEGAKTAPGKKRPVEPSPQRSPDSSTGIGKKGQQPARKRLNFGQTGDSESVPDPQPLGEPPAAPSGVGPNTMAAGGGAPMADNNEGADGVGSSSGNWHCDSTWLGDRVITTSTRTWALPTYNNHLYKQISNGTSGGATNDNTYFGYSTPWGYFDFNRFHCHFSPRDWQRLINNNWGFRPKRLSFKLFNIQVKEVTQNEGTKTIANNLTSTIQVFTDSEYQLPYVLGSAHQGCLPPFPADVFMIPQYGYLTLNNGSQAVGRSSFYCLEYFPSQMLRTGNNFQFTYTFEDVPFHSSYAHSQSLDRLMNPLIDQYLYYLSRTNTPSGTTTQSRLLFSQAGPTSMSLQAKNWLPGPCYRQQRLSKQANDNNNSNFPWTAATKYHLNGRDSLVNPGPAMASHKDDEERFFPSNGILIFGKQNAARDNADYSDVMLTSEEEIKTTNPVATEEYGIVADNLQQQNTAPQIGTVNSQGALPGMVWQNRDVYLQGPIWAKIPHTDGNFHPSPLMGGFGLKHPPPQILIKNTPVPADPPTTFNQSKLNSFITQYSTGQVSVEIEWELQKENSKRWNPEIQYTSNYYKSTSVDFAVNTEGVYSEPRPIGTRYLTRNL

SEQ ID NO: 71 - protein, 738 aa, artificial sequence
  synthetic polypeptide (Mutant4-129)
MAADGYLPDWLEDNLSEGIREWWALKPGAPKPKANQQKQDDGRGLVLPGYKYLGPFNGLDKGEPVNAADAAALEHDKAYDQQLQAGDNPYLRYNHADAEFQERLQEDTSFGGNLGRAVFQAKKRVLEPLGLVEEGAKTAPGKKRPVEPSPQRSPDSSTGIGKKGQQPARKRLNFGQTGDSESVPDPQPLGEPPAAPSGVGPNTMAAGGGAPMADNNEGADGVGSSSGNWHCDSTWLGDRVITTSTRTWALPTYNNHLYKQISNGTSGGATNDNTYFGYSTPWGYFDFNRFHCHFSPRDWQRLINNNWGFRPKRLSFKLFNIQVKEVTQNEGTKTIANNLTSTIQVFTDSEYQLPYVLGSAHQGCLPPFPADVFMIPQYGYLTLNNGSQAVGRSSFYCLEYFPSQMLRTGNNFQFTYTFEDVPFHSSYAHSQSLDRLMNPLIDQYLYYLNRTQTTSGTPTQSRLLFSQAGPTSMSLQAKNWLPGPCYRQQRLSKQANDNNNSNFPWTGATKYHLNGRDSLVNPGPAMASHKDDEERFFPSNGILIFGKQNAARDNADYSDVMLTSEEEIKTTNPVATEEYGIVADNLQQQNTAPQIGTVNSQGALPGMVWQNRDVYLQGPIWAKIPHTDGNFHPSPLMGGFGLKHPPPQILIKNTPVPADPPTTFNQSKLNSFITQYSTGQVSVEIEWELQKENSKRWNPEIQYTSNYYKSTSVDFAVNTEGVYSEPRPIGTRYLTRNL

SEQ ID NO: 72 - protein, 737 aa, artificial sequence
  synthetic polypeptide (Mutant4-767)
MAADGYLPDWLEDNLSEGIREWWALKPGAPKPKANQQKQDDGRGLVLPGYKYLGPFNGLDKGEPVNAADAAALEHDKAYDQQLQAGDNPYLRYNHADAEFQERLQEDTSFGGNLGRAVFQAKKRVLEPLGLVEEGAKTAPGKKRPVEPSPQRSPDSSTGIGKKGQQPARKRLNFGQTGDSESVPDPQPLGEPPAAPSGVGPNTMAAGGGAPMADNNEGADGVGSSSGNWHCDSTWLGDRVITTSTRTWALPTYNNHLYKQISNGTSGGATNDNTYFGYSTPWGYFDFNRFHCHFSPRDWQRLINNNWGFRPKRLSFKLFNIQVKEVTQNEGTKTIANNLTSTIQVFTDSEYQLPYVLGSAHQGCLPPFPADVFMIPQYGYLTLNNGSQAVGRSSFYCLEYFPSQMLRTGNNFQFTYTFEDVPFHSSYAHSQSLDRLMNPLIDQYLYYLNKTQSSGTLQQSRLLFSQAGPTSMSLQARNWLPGPCYRQQRVSKTSADKNNSEYSWTAATKYHLNGRDSLVNPGPAMASHKDDEERFFPSNGILIFGKQNAARDNADYSDVMLTSEEEIKTTNPVATEEYGIVADNLQQQNTAPQIGTVNSQGALPGMVWQNRDVYLQGPIWAKIPHTDGNFHPSPLMGGFGLKHPPPQILIKNTPVPADPPTTFNQSKLNSFITQYSTGQVSVEIEWELQKENSKRWNPEIQYTSNYYKSTSVDFAVNTEGVYSEPRPIGTRYLTRNL

SEQ ID NO: 73 - protein, 737 aa, artificial sequence
  dynthetic polypeptide (AAV9-R5-704)
MAADGYLPDWLEDNLSEGIREWWALKPGAPQPKANQQHQDNARGLVLPGYKYLGPGNGLDKGEPVNAADAAALEHDKAYDQQLKAGDNPYLKYNHADAEFQERLKEDTSFGGNLGRAVFQAKKRLLEPLGLVEEAAKTAPGKKRPVEQSPQEPDSSAGIGKSGAQPAKKRLNFGQTGDTESVPDPQPIGEPPAAPSGVGSLTMASGGGAPVADNNEGADGVGSSSGNWHCDSQWLGDRVITTSTRTWALPTYNNHLYKQISNSTSGGSSNDNAYFGYSTPWGYFDFNRFHCHFSPRDWQRLINNNWGFRPKRLNFKLFNIQVKEVTDNNGVKTIANNLTSTVQVFTDSDYQLPYVLGSAHEGCLPPFPADVFMIPQYGYLTLNDGSQAVGRSSFYCLEYFPSQMLRTGNNFQFSYEFENVPFHSSYAHSQSLDRLMNPLIDQYLYYLNKTQSNSGTLQQSRLLFSQAGPTSMSLQAKNWLPGPSYRQQRVSTTVTQNNNSEFAWPGASSWALNGRNSLMNPGPAMASHKEGEDRFFPLSGSLIFGKQGTGRDNVDADKVMITNEEEIKTTNPVATESYGQVATNHQSAQAQAQTGWVQNQGILPGMVWQDRDVYLQGPIWAKIPHTDGNFHPSPLMGGFGMKHPPPQILIKNTPVPADPPTAFNKDKLNSFITQYSTGQVSVEIEWELQKENSKRWNPEIQYTSNYYKSNNVEFAVNTEGVYSEPRPIGTRYLTRNL

SEQ ID NO: 74 - DNA, 2217 bp, artificial sequence
  synthetic polynucleotide coding for AAV8-704
  CDS (1)..(2217)
atggctgccgatggttatcttccagattggctcgaggacaacctctctgagggcattcgcgagtggtgggcgctgaaacctggagccccgaagcccaaagccaaccagcaaaagcaggacgacggccggggtctggtgcttcctggctacaagtacctcggacccttcaacggactcgacaagggggagcccgtcaacgcggcggacgcagcggccctcgagcacgacaaggcctacgaccagcagctgcaggcgggtgacaatccgtacctgcggtataaccacgccgacgccgagtttcaggagcgtctgcaagaagatacgtcttttgggggcaacctcgggcgagcagtcttccaggccaagaagcgggttctcgaacctctcggtctggttgaggaaggcgctaagacggctcctggaaagaagagaccggtagagccatcaccccagcgttctccagactcctctacgggcatcggcaagaaaggccaacagcccgccagaaaaagactcaattttggtcagactggcgactcagagtcagttccagaccctcaacctctcggagaacctccagcagcgccctctggtgtgggacctaatacaatggctgcaggcggtggcgcaccaatggcagacaataacgaaggcgccgacggagtgggtagttcctcgggaaattggcattgcgattccacatggctgggcgacagagtcatcaccaccagcacccgaacctgggccctgcccacctacaacaaccacctctacaagcaaatctccaacgggacatcgggaggagccaccaacgacaacacctacttcggctacagcaccccctgggggtattttgactttaacagattccactgccacttttcaccacgtgactggcagcgactcatcaacaacaactggggattccggcccaagagactcagcttcaagctcttcaacatccaggtcaaggaggtcacgcagaatgaaggcaccaagaccatcgccaataacctcaccagcaccatccaggtgtttacggactcggagtaccagctgccgtacgttctcggctctgcccaccagggctgcctgcctccgttcccggcggacgtgttcatgattccccagtacggctacctaacactcaacaacggtagtcaggccgtgggacgctcctccttctactgcctggaatactttccttcgcagatgctgagaaccggcaacaacttccagtttacttacaccttcgaggacgtgcctttccacagcagctacgcccacagccagagcttggaccggctgatgaatcctctgattgaccagtacctgtactatctgaacaagacacaatcaaatagtggaactcttcagcagtctcggctactgtttagtcaagctggacccaccagcatgtctcttcaagctaaaaactggctgcctggaccttgctacagacagcagcgtctgtcaaagcaggcaaacgacaacaacaacagcaactttccctggactgcggctacaaagtatcatctaaatggccgggactcgttggttaatccaggaccagctatggccagccacaaagacgatgaagaaaagtttttccccatgcatggaaccctgatatttggtaaacaaggaacaaatgctaacgacgcggatttggacaatgtcatgattacagatgaagaagaaatccgcaccaccaatcccgtggctacggagcagtacggatatgtgtcaaataatttgcaaaactcaaatactggtccaactactggaactgtcaatcaccaaggagcgttacctggtatggtgtggcaggatcgagacgtgtacctgcagggacccatttgggccaagattcctcacaccgatggacactttcatccttctccactgatgggaggttttgggctcaaacacccgcctcctcagatcatgatcaaaaacactcccgttccagccaatcctcctacaaacttcagttctgccaagtttgcttctttcatcacacagtattccacggggcaggtcagcgtggagatcgagtgggagctgcagaaggagaacagcaaacgctggaatcccgagattcagtacacttccaactacaacaaatctgttaatgtggactttactgtggacactaatggtgtgtattcagagcctcgccccattggcaccagatacctgactcgtaatctgtaa

SEQ ID NO: 75 - protein, 738 aa, artificial sequence; identical to SEQ ID NO: 31
  Synthetic Construct

SEQ ID NO: 76 - DNA, 2217 bp, artificial sequence
  synthetic polynucleotide coding for Mutant 1
  CDS (1)..(2217)
atggctgccgatggttatcttccagattggctcgaggacaacctctctgagggcattcgcgagtggtgggcgctgaaacctggagccccgaagcccaaagccaaccagcaaaagcaggacgacggccggggtctggtgcttcctggctacaagtacctcggacccttcaacggactcgacaagggggagcccgtcaacgcggcggacgcagcggccctcgagcacgacaaggcctacgaccagcagctgcaggcgggtgacaatccgtacctgcggtataaccacgccgacgccgagtttcaggagcgtctgcaagaagatacgtcttttgggggcaacctcgggcgagcagtcttccaggccaagaagcgggttctcgaacctctcggtctggttgaggaaggcgctaagacggctcctggaaagaagagaccggtagagccatcaccccagcgttctccagactcctctacgggcatcggcaagaaaggccaacagcccgccagaaaaagactcaattttggtcagactggcgactcagagtcagttccagaccctcaacctctcggagaacctccagcagcgccctctggtgtgggacctaatacaatggctgcaggcggtggcgcaccaatggcagacaataacgaaggcgccgacggagtgggtagttcctcgggaaattggcattgcgattccacatggctgggcgacagagtcatcaccaccagcacccgaacctgggccctgcccacctacaacaaccacctctacaagcaaatctccaacgggacatcgggaggagccaccaacgacaacacctacttcggctacagcaccccctgggggtattttgactttaacagattccactgccacttttcaccacgtgactggcagcgactcatcaacaacaactggggattccggcccaagagactcagcttcaagctcttcaacatccaggtcaaggaggtcacgcagaatgaaggcaccaagaccatcgccaataacctcaccagcaccatccaggtgtttacggactcggagtaccagctgccgtacgttctcggctctgcccaccagggctgcctgcctccgttcccggcggacgtgttcatgattccccagtacggctacctaacactcaacaacggtagtcaggccgtgggacgctcctccttctactgcctggaatactttccttcgcagatgctgagaaccggcaacaacttccagtttacttacaccttcgaggacgtgcctttccacagcagctacgcccacagccagagcttggaccggctgatgaatcctctgattgaccagtacctgtactatctgaacaagacacaatcaaatagtggaactcttcagcagtctcggctactgtttagtcaagctggacccaccagcatgtctcttcaagctaaaaactggctgcctggaccttgctacagacagcagcgtctgtcaaagcaggcaaacgacaacaacaacagcaactttccctggactgcggctacaaagtatcatctaaatggccgggactcgttggttaatccaggaccagctatggccagccacaaagacgatgaagaaaagtttttccccatgcatggaaccctgatatttggtaaacaaggaacaaatgctaacgacgcggatttggacaatgtcatgattacagatgaagaagaaatccgcaccaccaatcccgtggctacggagcagtacggatatgtgtcaaataatttgcaaaactcaaatactggtccaactactggaactgtcaatcaccaaggagcgttacctggtatggtgtggcaggatcgagacgtgtacctgcagggacccatttgggccaagattcctcacaccgatggacactttcatccttctccactgatgggaggttttgggctcaaacacccgcctcctcagatcatgatcaaaaacactcccgttccagccaatcctcctacaaacttcagttctgccaagtttgcttctttcatcacacagtattccacggggcaggtcagcgtggagatcgagtgggagctgcagaaggaaaacagcaagcgctggaaccccgagatccagtacacctccaactactacaaatctacaagtgtggactttgctgttaatacagaaggcgtgtactctgaaccccgccccattggcacccgttacctcacccgtaatctgtaa

SEQ ID NO: 77 - protein, 738 aa, artificial sequence; identical to SEQ ID NO: 32
  Synthetic Construct

SEQ ID NO: 78 - DNA, 2217 bp, artificial sequence; identical to SEQ ID NO: 76
  synthetic polynucleotide coding for Mutant 2
  CDS (1)..(2217)

SEQ ID NO: 79 - protein, 738 aa, artificial sequence; identical to SEQ ID NO: 32
  Synthetic Construct

SEQ ID NO: 80 - DNA, 2217 bp, artificial sequence
  synthetic polynucleotide coding for Mutant 3
  CDS (1)..(2217)
atggctgccgatggttatcttccagattggctcgaggacaacctctctgagggcattcgcgagtggtgggcgctgaaacctggagccccgaagcccaaagccaaccagcaaaagcaggacgacggccggggtctggtgcttcctggctacaagtacctcggacccttcaacggactcgacaagggggagcccgtcaacgcggcggacgcagcggccctcgagcacgacaaggcctacgaccagcagctgcaggcgggtgacaatccgtacctgcggtataaccacgccgacgccgagtttcaggagcgtctgcaagaagatacgtcttttgggggcaacctcgggcgagcagtcttccaggccaagaagcgggttctcgaacctctcggtctggttgaggaaggcgctaagacggctcctggaaagaagagaccggtagagccatcaccccagcgttctccagactcctctacgggcatcggcaagaaaggccaacagcccgccagaaaaagactcaattttggtcagactggcgactcagagtcagttccagaccctcaacctctcggagaacctccagcagcgccctctggtgtgggacctaatacaatggctgcaggcggtggcgcaccaatggcagacaataacgaaggcgccgacggagtgggtagttcctcgggaaattggcattgcgattccacatggctgggcgacagagtcatcaccaccagcacccgaacctgggccctgcccacctacaacaaccacctctacaagcaaatctccaacgggacatcgggaggagccaccaacgacaacacctacttcggctacagcaccccctgggggtattttgactttaacagattccactgccacttttcaccacgtgactggcagcgactcatcaacaacaactggggattccggcccaagagactcagcttcaagctcttcaacatccaggtcaaggaggtcacgcagaatgaaggcaccaagaccatcgccaataacctcaccagcaccatccaggtgtttacggactcggagtaccagctgccgtacgttctcggctctgcccaccagggctgcctgcctccgttcccggcggacgtgttcatgattccccagtacggctacctaacactcaacaacggtagtcaggccgtgggacgctcctccttctactgcctggaatactttccttcgcagatgctgagaaccggcaacaacttccagtttacttacaccttcgaggacgtgcctttccacagcagctacgcccacagccagagcttggaccggctgatgaatcctctgattgaccagtacctgtactatctgaacaagacacaatcaaatagtggaactcttcagcagtctcggctactgtttagtcaagctggacccaccagcatgtctcttcaagctaaaaactggctgcctggaccttgctacagacagcagcgtctgtcaaagcaggcaaacgacaacaacaacagcaactttccctggactgcggctacaaagtatcatctaaatggccgggactcgttggttaatccaggaccagctatggccagccacaaagacgatgaagaaaagtttttccccatgcatggaaccctgatatttggtaaacaaggaacaaatgctaacgacgcggatttggacaatgtcatgattacagatgaagaagaaatccgcaccactaaccctgtggctacagaggaatacggtatcgtggcagataacttgcagcagcaaaacacggctcctcaaattggaactgtcaacagccagggggccttacccggtatggtctggcagaaccgggacgtgtacctgcagggtcccatctgggccaagattcctcacacggacggcaacttccacccgtctccgctgatgggcggctttggcctgaaacatcctccgcctcagatcctgatcaagaacacgcctgtacctgcggatcctccgaccaccttcaaccagtcaaagctgaactctttcatcacgcaatacagcaccggacaggtcagcgtggaaattgaatgggagctgcagaaggaaaacagcaagcgctggaaccccgagatccagtacacctccaactactacaaatctacaagtgtggactttgctgttaatacagaaggcgtgtactctgaaccccgccccattggcacccgttacctcacccgtaatctgtaa

SEQ ID NO: 81 - protein, 738 aa, artificial sequence; identical to SEQ ID NO: 34
  Synthetic Construct

SEQ ID NO: 82 - DNA, 2217 bp, artificial sequence
  synthetic polynucleotide coding for Mutant 4
  CDS (1)..(2217)
atggctgccgatggttatcttccagattggctcgaggacaacctctctgagggcattcgcgagtggtgggcgctgaaacctggagccccgaagcccaaagccaaccagcaaaagcaggacgacggccggggtctggtgcttcctggctacaagtacctcggacccttcaacggactcgacaagggggagcccgtcaacgcggcggacgcagcggccctcgagcacgacaaggcctacgaccagcagctgcaggcgggtgacaatccgtacctgcggtataaccacgccgacgccgagtttcaggagcgtctgcaagaagatacgtcttttgggggcaacctcgggcgagcagtcttccaggccaagaagcgggttctcgaacctctcggtctggttgaggaaggcgctaagacggctcctggaaagaagagaccggtagagccatcaccccagcgttctccagactcctctacgggcatcggcaagaaaggccaacagcccgccagaaaaagactcaattttggtcagactggcgactcagagtcagttccagaccctcaacctctcggagaacctccagcagcgccctctggtgtgggacctaatacaatggctgcaggcggtggcgcaccaatggcagacaataacgaaggcgccgacggagtgggtagttcctcgggaaattggcattgcgattccacatggctgggcgacagagtcatcaccaccagcacccgaacctgggccctgcccacctacaacaaccacctctacaagcaaatctccaacgggacatcgggaggagccaccaacgacaacacctacttcggctacagcaccccctgggggtattttgactttaacagattccactgccacttttcaccacgtgactggcagcgactcatcaacaacaactggggattccggcccaagagactcagcttcaagctcttcaacatccaggtcaaggaggtcacgcagaatgaaggcaccaagaccatcgccaataacctcaccagcaccatccaggtgtttacggactcggagtaccagctgccgtacgttctcggctctgcccaccagggctgcctgcctccgttcccggcggacgtgttcatgattccccagtacggctacctaacactcaacaacggtagtcaggccgtgggacgctcctccttctactgcctggaatactttccttcgcagatgctgagaaccggcaacaacttccagtttacttacaccttcgaggacgtgcctttccacagcagctacgcccacagccagagcttggaccggctgatgaatcctctgattgaccagtacctgtactatctgaacaagacacaatcaaatagtggaactcttcagcagtctcggctactgtttagtcaagctggacccaccagcatgtctcttcaagctaaaaactggctgcctggaccttgctacagacagcagcgtctgtcaaagcaggcaaacgacaacaacaacagcaactttccctggactgcggctacaaagtatcatctaaatggccgggactcgttggttaatccaggaccagctatggccagccacaaagacgacgaggagcgtttttttcccagtaacgggatcctgatttttggcaaacaaaatgctgccagagacaatgcggattacagcgatgtcatgctcaccagcgaggaagaaatcaaaaccactaaccctgtggctacagaggaatacggtatcgtggcagataacttgcagcagcaaaacacggctcctcaaattggaactgtcaacagccagggggccttacccggtatggtctggcagaaccgggacgtgtacctgcagggtcccatctgggccaagattcctcacacggacggcaacttccacccgtctccgctgatgggcggctttggcctgaaacatcctccgcctcagatcctgatcaagaacacgcctgtacctgcggatcctccgaccaccttcaaccagtcaaagctgaactctttcatcacgcaatacagcaccggacaggtcagcgtggaaattgaatgggagctgcagaaggaaaacagcaagcgctggaaccccgagatccagtacacctccaactactacaaatctacaagtgtggactttgctgttaatacagaaggcgtgtactctgaaccccgccccattggcacccgttacctcacccgtaatctgtaa

SEQ ID NO: 83 - protein, 738 aa, artificial sequence; identical to SEQ ID NO: 35
  Synthetic Construct

SEQ ID NO: 84 - DNA, 2217 bp, artificial sequence
  synthetic polynucleotide coding for Mutant 5
  CDS (1)..(2217)
atggctgccgatggttatcttccagattggctcgaggacaacctctctgagggcattcgcgagtggtgggcgctgaaacctggagccccgaagcccaaagccaaccagcaaaagcaggacgacggccggggtctggtgcttcctggctacaagtacctcggacccttcaacggactcgacaagggggagcccgtcaacgcggcggacgcagcggccctcgagcacgacaaggcctacgaccagcagctgcaggcgggtgacaatccgtacctgcggtataaccacgccgacgccgagtttcaggagcgtctgcaagaagatacgtcttttgggggcaacctcgggcgagcagtcttccaggccaagaagcgggttctcgaacctctcggtctggttgaggaaggcgctaagacggctcctggaaagaagagaccggtagagccatcaccccagcgttctccagactcctctacgggcatcggcaagaaaggccaacagcccgccagaaaaagactcaattttggtcagactggcgactcagagtcagttccagaccctcaacctctcggagaacctccagcagcgccctctggtgtgggacctaatacaatggctgcaggcggtggcgcaccaatggcagacaataacgaaggcgccgacggagtgggtagttcctcgggaaattggcattgcgattccacatggctgggcgacagagtcatcaccaccagcacccgaacctgggccctgcccacctacaacaaccacctctacaagcaaatctccaacgggacatcgggaggagccaccaacgacaacacctacttcggctacagcaccccctgggggtattttgactttaacagattccactgccacttttcaccacgtgactggcagcgactcatcaacaacaactggggattccggcccaagagactcagcttcaagctcttcaacatccaggtcaaggaggtcacgcagaatgaaggcaccaagaccatcgccaataacctcaccagcaccatccaggtgtttacggactcggagtaccagctgccgtacgttctcggctctgcccaccagggctgcctgcctccgttcccggcggacgtgttcatgattccccagtacggctacctaacactcaacaacggtagtcaggccgtgggacgctcctccttctactgcctggaatactttccttcgcagatgctgagaaccggcaacaacttccagtttacttacaccttcgaggacgtgcctttccacagcagctacgcccacagccagagcttggaccggctgatgaatcctctgattgaccagtacctgtactatctgaacaagacacaatcaaatagtggaactcttcagcagtctcggctactgtttagtcaagctggacccaccagcatgtctcttcaagctaaaaactggctgcctggaccttgctaccgccaacaacgcgtctcaacgacaaccgggcaaaacaacaatagcaactttgcctggactgctgggaccaaataccatctgaatggaagaaattcattggctaatcctggcatcgctatggcaacacacaaagacgacgaggagcgtttttttcccagtaacgggatcctgatttttggcaaacaaaatgctgccagagacaatgcggattacagcgatgtcatgctcaccagcgaggaagaaatcaaaaccactaaccctgtggctacagaggaatacggtatcgtggcagataacttgcagcagcaaaacacggctcctcaaattggaactgtcaacagccagggggccttacccggtatggtctggcagaaccgggacgtgtacctgcagggtcccatctgggccaagattcctcacacggacggcaacttccacccgtctccgctgatgggcggctttggcctgaaacatcctccgcctcagatcctgatcaagaacacgcctgtacctgcggatcctccgaccaccttcaaccagtcaaagctgaactctttcatcacgcaatacagcaccggacaggtcagcgtggaaattgaatgggagctgcagaaggaaaacagcaagcgctggaaccccgagatccagtacacctccaactactacaaatctacaagtgtggactttgctgttaatacagaaggcgtgtactctgaaccccgccccattggcacccgttacctcacccgtaatctgtaa

SEQ ID NO: 85 - protein, 738 aa, artificial sequence; identical to SEQ ID NO: 36
  Synthetic Construct

SEQ ID NO: 86 - DNA, 2214 bp, artificial sequence
  synthetic polynucleotide coding for AAV8-mut.HVR1
  CDS (1)..(2214)
atggctgccgatggttatcttccagattggctcgaggacaacctctctgagggcattcgcgagtggtgggcgctgaaacctggagccccgaagcccaaagccaaccagcaaaagcaggacgacggccggggtctggtgcttcctggctacaagtacctcggacccttcaacggactcgacaagggggagcccgtcaacgcggcggacgcagcggccctcgagcacgacaaggcctacgaccagcagctgcaggcgggtgacaatccgtacctgcggtataaccacgccgacgccgagtttcaggagcgtctgcaagaagatacgtcttttgggggcaacctcgggcgagcagtcttccaggccaagaagcgggttctcgaacctctcggtctggttgaggaacctgttaagacggctccgggaaaaaagaggccggtagagcactctcctgtggagccagactcctcctcgggaaccggaaaagcgggccaacagcccgccagaaaaagactcaattttggtcagactggcgactcagagtcagttccagaccctcaacctctcggagaacctccagcagcgccctctggtgtgggacctaatacaatggctgcaggcggtggcgcaccaatggcagacaataacgaaggcgccgacggagtgggtagttcctcgggaaattggcattgcgattccacatggctgggcgacagagtcatcaccaccagcacccgaacctgggccctgcccacctacaacaaccacctctacaagcaaatctccaacgggacatcgggaggagccaccaacgacaacacctacttcggctacagcaccccctgggggtattttgactttaacagattccactgccacttttcaccacgtgactggcagcgactcatcaacaacaactggggattccggcccaagagactcagcttcaagctcttcaacatccaggtcaaggaggtcacgcagaatgaaggcaccaagaccatcgccaataacctcaccagcaccatccaggtgtttacggactcggagtaccagctgccgtacgttctcggctctgcccaccagggctgcctgcctccgttcccggcggacgtgttcatgattccccagtacggctacctaacactcaacaacggtagtcaggccgtgggacgctcctccttctactgcctggaatactttccttcgcagatgctgagaaccggcaacaacttccagtttacttacaccttcgaggacgtgcctttccacagcagctacgcccacagccagagcttggaccggctgatgaatcctctgattgaccagtacctgtactacttgtctcggactcaaacaacaggaggcacggcaaatacgcagactctgggcttcagccaaggtgggcctaatacaatggccaatcaggcaaagaactggctgccaggaccctgttaccgccaacaacgcgtctcaacgacaaccgggcaaaacaacaatagcaactttgcctggactgctgggaccaaataccatctgaatggaagaaattcattggctaatcctggcatcgctatggcaacacacaaagacgacgaggagcgtttttttcccagtaacgggatcctgatttttggcaaacaaaatgctgccagagacaatgcggattacagcgatgtcatgctcaccagcgaggaagaaatcaaaaccactaaccctgtggctacagaggaatacggtatcgtggcagataacttgcagcagcaaaacacggctcctcaaattggaactgtcaacagccagggggccttacccggtatggtctggcagaaccgggacgtgtacctgcagggtcccatctgggccaagattcctcacacggacggcaacttccacccgtctccgctgatgggcggctttggcctgaaacatcctccgcctcagatcctgatcaagaacacgcctgtacctgcggatcctccgaccaccttcaaccagtcaaagctgaactctttcatcacgcaatacagcaccggacaggtcagcgtggaaattgaatgggagctgcagaaggaaaacagcaagcgctggaaccccgagatccagtacacctccaactactacaaatctacaagtgtggactttgctgttaatacagaaggcgtgtactctgaaccccgccccattggcacccgttacctcacccgtaatctgtaa

SEQ ID NO: 87 - protein, 737 aa, artificial sequence; identical to SEQ ID NO: 37
  Synthetic Construct

SEQ ID NO: 88 - DNA, 2211 bp, artificial sequence
  synthetic polynucleotide coding for AAV8-mut.HVR3
  CDS (1)..(2211)
atggctgccgatggttatcttccagattggctcgaggacaacctctctgagggcattcgcgagtggtgggcgctgaaacctggagccccgaagcccaaagccaaccagcaaaagcaggacgacggccggggtctggtgcttcctggctacaagtacctcggacccttcaacggactcgacaagggggagcccgtcaacgcggcggacgcagcggccctcgagcacgacaaggcctacgaccagcagctgcaggcgggtgacaatccgtacctgcggtataaccacgccgacgccgagtttcaggagcgtctgcaagaagatacgtcttttgggggcaacctcgggcgagcagtcttccaggccaagaagcgggttctcgaacctctcggtctggttgaggaaggcgctaagacggctcctggaaagaagagaccggtagagccatcaccccagcgttctccagactcctctacgggcatcggcaagaaaggccaacagcccgccagaaaaagactcaattttggtcagactggcgactcagagtcagttccagaccctcaacctctcggagaacctccagcagcgccctctggtgtgggacctaatacaatggctgcaggcggtggcgcaccaatggcagacaataacgaaggcgccgacggagtgggtagttcctcgggaaattggcattgcgattccacatggctgggcgacagagtcatcaccaccagcacccgaacctgggccctgcccacctacaacaaccacctctacaagcaaatctccagccaatcaggagcctcaaacgacaaccactacttcggctacagcaccccctgggggtattttgactttaacagattccactgccacttttcaccacgtgactggcagcgactcatcaacaacaactggggattccggcccaagagactcagcttcaagctcttcaacatccaggtcaaggaggtcacgcagaatgaaggcaccaagaccatcgccaataacctcaccagcaccatccaggtgtttacggactcggagtaccagctgccgtacgttctcggctctgcccaccagggctgcctgcctccgttcccggcggacgtgttcatgattccccagtacggctacctaacactcaacaacggtagtcaggccgtgggacgctcctccttctactgcctggaatactttccttcgcagatgctgagaaccggcaacaacttccagtttacttacaccttcgaggacgtgcctttccacagcagctacgcccacagccagagcttggaccggctgatgaatcctctgattgaccagtacctgtactacttgtctcggactcaaacaacaggaggcacggcaaatacgcagactctgggcttcagccaaggtgggcctaatacaatggccaatcaggcaaagaactggctgccaggaccctgttaccgccaacaacgcgtctcaacgacaaccgggcaaaacaacaatagcaactttgcctggactgctgggaccaaataccatctgaatggaagaaattcattggctaatcctggcatcgctatggcaacacacaaagacgacgaggagcgtttttttcccagtaacgggatcctgatttttggcaaacaaaatgctgccagagacaatgcggattacagcgatgtcatgctcaccagcgaggaagaaatcaaaaccactaaccctgtggctacagaggaatacggtatcgtggcagataacttgcagcagcaaaacacggctcctcaaattggaactgtcaacagccagggggccttacccggtatggtctggcagaaccgggacgtgtacctgcagggtcccatctgggccaagattcctcacacggacggcaacttccacccgtctccgctgatgggcggctttggcctgaaacatcctccgcctcagatcctgatcaagaacacgcctgtacctgcggatcctccgaccaccttcaaccagtcaaagctgaactctttcatcacgcaatacagcaccggacaggtcagcgtggaaattgaatgggagctgcagaaggaaaacagcaagcgctggaaccccgagatccagtacacctccaactactacaaatctacaagtgtggactttgctgttaatacagaaggcgtgtactctgaaccccgccccattggcacccgttacctcacccgtaatctgtaa

SEQ ID NO: 89 - protein, 736 aa, artificial sequence; identical to SEQ ID NO: 38
  Synthetic Construct

SEQ ID NO: 90 - DNA, 2217 bp, artificial sequence
  synthetic polynucleotide enoding AAV8-mut.HVR6
  CDS (1)..(2217)
atggctgccgatggttatcttccagattggctcgaggacaacctctctgagggcattcgcgagtggtgggcgctgaaacctggagccccgaagcccaaagccaaccagcaaaagcaggacgacggccggggtctggtgcttcctggctacaagtacctcggacccttcaacggactcgacaagggggagcccgtcaacgcggcggacgcagcggccctcgagcacgacaaggcctacgaccagcagctgcaggcgggtgacaatccgtacctgcggtataaccacgccgacgccgagtttcaggagcgtctgcaagaagatacgtcttttgggggcaacctcgggcgagcagtcttccaggccaagaagcgggttctcgaacctctcggtctggttgaggaaggcgctaagacggctcctggaaagaagagaccggtagagccatcaccccagcgttctccagactcctctacgggcatcggcaagaaaggccaacagcccgccagaaaaagactcaattttggtcagactggcgactcagagtcagttccagaccctcaacctctcggagaacctccagcagcgccctctggtgtgggacctaatacaatggctgcaggcggtggcgcaccaatggcagacaataacgaaggcgccgacggagtgggtagttcctcgggaaattggcattgcgattccacatggctgggcgacagagtcatcaccaccagcacccgaacctgggccctgcccacctacaacaaccacctctacaagcaaatctccaacgggacatcgggaggagccaccaacgacaacacctacttcggctacagcaccccctgggggtattttgactttaacagattccactgccacttttcaccacgtgactggcagcgactcatcaacaacaactggggattccggcccaagagactcagcttcaagctcttcaacatccaggtcaaggaggtcacgcagaatgaaggcaccaagaccatcgccaataacctcaccagcaccatccaggtgtttacggactcggagtaccagctgccgtacgttctcggctctgcccaccagggctgcctgcctccgttcccggcggacgtgttcatgattccccagtacggctacctaacactcaacaacggtagtcaggccgtgggacgctcctccttctactgcctggaatactttccttcgcagatgctgagaaccggcaacaacttccagtttacttacaccttcgaggacgtgcctttccacagcagctacgcccacagccagagcttggaccggctgatgaatcctctgattgaccagtacctgtactacttgtctcggactcaaacaacaggaggcacggcaaatacgcagactctgggcttcagccaaggtgggcctaatacaatggccaatcaggcaaagaactggctgccaggaccctgctacagacagcagcgtctgtcaaagcaggcaaacgacaacaacaacagcaactttgcctggactgctgggaccaaataccatctgaatggaagaaattcattggctaatcctggcatcgctatggcaacacacaaagacgacgaggagcgtttttttcccagtaacgggatcctgatttttggcaaacaaaatgctgccagagacaatgcggattacagcgatgtcatgctcaccagcgaggaagaaatcaaaaccactaaccctgtggctacagaggaatacggtatcgtggcagataacttgcagcagcaaaacacggctcctcaaattggaactgtcaacagccagggggccttacccggtatggtctggcagaaccgggacgtgtacctgcagggtcccatctgggccaagattcctcacacggacggcaacttccacccgtctccgctgatgggcggctttggcctgaaacatcctccgcctcagatcctgatcaagaacacgcctgtacctgcggatcctccgaccaccttcaaccagtcaaagctgaactctttcatcacgcaatacagcaccggacaggtcagcgtggaaattgaatgggagctgcagaaggaaaacagcaagcgctggaaccccgagatccagtacacctccaactactacaaatctacaagtgtggactttgctgttaatacagaaggcgtgtactctgaaccccgccccattggcacccgttacctcacccgtaatctgtaa

SEQ ID NO: 91 - protein, 738 aa, artificial sequence; identical to SEQ ID NO: 39
  Synthetic Construct

SEQ ID NO: 92 - DNA, 2217 bp, artificial sequence
  synthetic polynucleotide coding for AAV8-mut.HVR7
  CDS (1)..(2217)
atggctgccgatggttatcttccagattggctcgaggacaacctctctgagggcattcgcgagtggtgggcgctgaaacctggagccccgaagcccaaagccaaccagcaaaagcaggacgacggccggggtctggtgcttcctggctacaagtacctcggacccttcaacggactcgacaagggggagcccgtcaacgcggcggacgcagcggccctcgagcacgacaaggcctacgaccagcagctgcaggcgggtgacaatccgtacctgcggtataaccacgccgacgccgagtttcaggagcgtctgcaagaagatacgtcttttgggggcaacctcgggcgagcagtcttccaggccaagaagcgggttctcgaacctctcggtctggttgaggaaggcgctaagacggctcctggaaagaagagaccggtagagccatcaccccagcgttctccagactcctctacgggcatcggcaagaaaggccaacagcccgccagaaaaagactcaattttggtcagactggcgactcagagtcagttccagaccctcaacctctcggagaacctccagcagcgccctctggtgtgggacctaatacaatggctgcaggcggtggcgcaccaatggcagacaataacgaaggcgccgacggagtgggtagttcctcgggaaattggcattgcgattccacatggctgggcgacagagtcatcaccaccagcacccgaacctgggccctgcccacctacaacaaccacctctacaagcaaatctccaacgggacatcgggaggagccaccaacgacaacacctacttcggctacagcaccccctgggggtattttgactttaacagattccactgccacttttcaccacgtgactggcagcgactcatcaacaacaactggggattccggcccaagagactcagcttcaagctcttcaacatccaggtcaaggaggtcacgcagaatgaaggcaccaagaccatcgccaataacctcaccagcaccatccaggtgtttacggactcggagtaccagctgccgtacgttctcggctctgcccaccagggctgcctgcctccgttcccggcggacgtgttcatgattccccagtacggctacctaacactcaacaacggtagtcaggccgtgggacgctcctccttctactgcctggaatactttccttcgcagatgctgagaaccggcaacaacttccagtttacttacaccttcgaggacgtgcctttccacagcagctacgcccacagccagagcttggaccggctgatgaatcctctgattgaccagtacctgtactacttgtctcggactcaaacaacaggaggcacggcaaatacgcagactctgggcttcagccaaggtgggcctaatacaatggccaatcaggcaaagaactggctgccaggaccctgttaccgccaacaacgcgtctcaacgacaaccgggcaaaacaacaatagcaactttccctggactgcggctacaaagtatcatctaaatggccggaattcattggctaatcctggcatcgctatggcaacacacaaagacgacgaggagcgtttttttcccagtaacgggatcctgatttttggcaaacaaaatgctgccagagacaatgcggattacagcgatgtcatgctcaccagcgaggaagaaatcaaaaccactaaccctgtggctacagaggaatacggtatcgtggcagataacttgcagcagcaaaacacggctcctcaaattggaactgtcaacagccagggggccttacccggtatggtctggcagaaccgggacgtgtacctgcagggtcccatctgggccaagattcctcacacggacggcaacttccacccgtctccgctgatgggcggctttggcctgaaacatcctccgcctcagatcctgatcaagaacacgcctgtacctgcggatcctccgaccaccttcaaccagtcaaagctgaactctttcatcacgcaatacagcaccggacaggtcagcgtggaaattgaatgggagctgcagaaggaaaacagcaagcgctggaaccccgagatccagtacacctccaactactacaaatctacaagtgtggactttgctgttaatacagaaggcgtgtactctgaaccccgccccattggcacccgttacctcacccgtaatctgtaa

SEQ ID NO: 93 - protein, 738 aa, artificial sequence; identical to SEQ ID NO: 40
  Synthetic Construct

SEQ ID NO: 94 - DNA, 2217 bp, artificial sequence
  synthetic polynucleotide coding for AAV8-mut.HVR8
  CDS (1)..(2217)
atggctgccgatggttatcttccagattggctcgaggacaacctctctgagggcattcgcgagtggtgggcgctgaaacctggagccccgaagcccaaagccaaccagcaaaagcaggacgacggccggggtctggtgcttcctggctacaagtacctcggacccttcaacggactcgacaagggggagcccgtcaacgcggcggacgcagcggccctcgagcacgacaaggcctacgaccagcagctgcaggcgggtgacaatccgtacctgcggtataaccacgccgacgccgagtttcaggagcgtctgcaagaagatacgtcttttgggggcaacctcgggcgagcagtcttccaggccaagaagcgggttctcgaacctctcggtctggttgaggaaggcgctaagacggctcctggaaagaagagaccggtagagccatcaccccagcgttctccagactcctctacgggcatcggcaagaaaggccaacagcccgccagaaaaagactcaattttggtcagactggcgactcagagtcagttccagaccctcaacctctcggagaacctccagcagcgccctctggtgtgggacctaatacaatggctgcaggcggtggcgcaccaatggcagacaataacgaaggcgccgacggagtgggtagttcctcgggaaattggcattgcgattccacatggctgggcgacagagtcatcaccaccagcacccgaacctgggccctgcccacctacaacaaccacctctacaagcaaatctccaacgggacatcgggaggagccaccaacgacaacacctacttcggctacagcaccccctgggggtattttgactttaacagattccactgccacttttcaccacgtgactggcagcgactcatcaacaacaactggggattccggcccaagagactcagcttcaagctcttcaacatccaggtcaaggaggtcacgcagaatgaaggcaccaagaccatcgccaataacctcaccagcaccatccaggtgtttacggactcggagtaccagctgccgtacgttctcggctctgcccaccagggctgcctgcctccgttcccggcggacgtgttcatgattccccagtacggctacctaacactcaacaacggtagtcaggccgtgggacgctcctccttctactgcctggaatactttccttcgcagatgctgagaaccggcaacaacttccagtttacttacaccttcgaggacgtgcctttccacagcagctacgcccacagccagagcttggaccggctgatgaatcctctgattgaccagtacctgtactacttgtctcggactcaaacaacaggaggcacggcaaatacgcagactctgggcttcagccaaggtgggcctaatacaatggccaatcaggcaaagaactggctgccaggaccctgttaccgccaacaacgcgtctcaacgacaaccgggcaaaacaacaatagcaactttgcctggactgctgggacaaagtatcatctaaatggccgggactcgttggttaatccaggaccagctatggccagccacaaagacgacgaggagcgtttttttcccagtaacgggatcctgatttttggcaaacaaaatgctgccagagacaatgcggattacagcgatgtcatgctcaccagcgaggaagaaatcaaaaccactaaccctgtggctacagaggaatacggtatcgtggcagataacttgcagcagcaaaacacggctcctcaaattggaactgtcaacagccagggggccttacccggtatggtctggcagaaccgggacgtgtacctgcagggtcccatctgggccaagattcctcacacggacggcaacttccacccgtctccgctgatgggcggctttggcctgaaacatcctccgcctcagatcctgatcaagaacacgcctgtacctgcggatcctccgaccaccttcaaccagtcaaagctgaactctttcatcacgcaatacagcaccggacaggtcagcgtggaaattgaatgggagctgcagaaggaaaacagcaagcgctggaaccccgagatccagtacacctccaactactacaaatctacaagtgtggactttgctgttaatacagaaggcgtgtactctgaaccccgccccattggcacccgttacctcacccgtaatctgtaa

SEQ ID NO: 95 - protein, 738 aa, artificial sequence; identical to SEQ ID NO: 41
  Synthetic Construct

SEQ ID NO: 96 - DNA, 2217 bp, artificial sequence
  synthetic polynucleotide encoding AAV8-mut.HVR9
  CDS (1)..(2217)
atggctgccgatggttatcttccagattggctcgaggacaacctctctgagggcattcgcgagtggtgggcgctgaaacctggagccccgaagcccaaagccaaccagcaaaagcaggacgacggccggggtctggtgcttcctggctacaagtacctcggacccttcaacggactcgacaagggggagcccgtcaacgcggcggacgcagcggccctcgagcacgacaaggcctacgaccagcagctgcaggcgggtgacaatccgtacctgcggtataaccacgccgacgccgagtttcaggagcgtctgcaagaagatacgtcttttgggggcaacctcgggcgagcagtcttccaggccaagaagcgggttctcgaacctctcggtctggttgaggaaggcgctaagacggctcctggaaagaagagaccggtagagccatcaccccagcgttctccagactcctctacgggcatcggcaagaaaggccaacagcccgccagaaaaagactcaattttggtcagactggcgactcagagtcagttccagaccctcaacctctcggagaacctccagcagcgccctctggtgtgggacctaatacaatggctgcaggcggtggcgcaccaatggcagacaataacgaaggcgccgacggagtgggtagttcctcgggaaattggcattgcgattccacatggctgggcgacagagtcatcaccaccagcacccgaacctgggccctgcccacctacaacaaccacctctacaagcaaatctccaacgggacatcgggaggagccaccaacgacaacacctacttcggctacagcaccccctgggggtattttgactttaacagattccactgccacttttcaccacgtgactggcagcgactcatcaacaacaactggggattccggcccaagagactcagcttcaagctcttcaacatccaggtcaaggaggtcacgcagaatgaaggcaccaagaccatcgccaataacctcaccagcaccatccaggtgtttacggactcggagtaccagctgccgtacgttctcggctctgcccaccagggctgcctgcctccgttcccggcggacgtgttcatgattccccagtacggctacctaacactcaacaacggtagtcaggccgtgggacgctcctccttctactgcctggaatactttccttcgcagatgctgagaaccggcaacaacttccagtttacttacaccttcgaggacgtgcctttccacagcagctacgcccacagccagagcttggaccggctgatgaatcctctgattgaccagtacctgtactacttgtctcggactcaaacaacaggaggcacggcaaatacgcagactctgggcttcagccaaggtgggcctaatacaatggccaatcaggcaaagaactggctgccaggaccctgttaccgccaacaacgcgtctcaacgacaaccgggcaaaacaacaatagcaactttgcctggactgctgggaccaaataccatctgaatggaagaaattcattggctaatcctggcatcgctatggcaacacacaaagacgatgaagaaaagtttttccccatgcatggaaccctgatatttggtaaacaaggaacaaatgctaacgacgcggatttggacaatgtcatgattacagatgaagaagaaatccgcaccactaaccctgtggctacagaggaatacggtatcgtggcagataacttgcagcagcaaaacacggctcctcaaattggaactgtcaacagccagggggccttacccggtatggtctggcagaaccgggacgtgtacctgcagggtcccatctgggccaagattcctcacacggacggcaacttccacccgtctccgctgatgggcggctttggcctgaaacatcctccgcctcagatcctgatcaagaacacgcctgtacctgcggatcctccgaccaccttcaaccagtcaaagctgaactctttcatcacgcaatacagcaccggacaggtcagcgtggaaattgaatgggagctgcagaaggaaaacagcaagcgctggaaccccgagatccagtacacctccaactactacaaatctacaagtgtggactttgctgttaatacagaaggcgtgtactctgaaccccgccccattggcacccgttacctcacccgtaatctgtaa

SEQ ID NO: 97 - protein, 738 aa, artificial sequence; identical to SEQ ID NO: 42
  Synthetic Construct

SEQ ID NO: 98 - DNA, 2217 bp, artificial sequence
  synthetic polynucleotide encoding AAV8-mut.HVR10
  CDS (1)..(2217)
atggctgccgatggttatcttccagattggctcgaggacaacctctctgagggcattcgcgagtggtgggcgctgaaacctggagccccgaagcccaaagccaaccagcaaaagcaggacgacggccggggtctggtgcttcctggctacaagtacctcggacccttcaacggactcgacaagggggagcccgtcaacgcggcggacgcagcggccctcgagcacgacaaggcctacgaccagcagctgcaggcgggtgacaatccgtacctgcggtataaccacgccgacgccgagtttcaggagcgtctgcaagaagatacgtcttttgggggcaacctcgggcgagcagtcttccaggccaagaagcgggttctcgaacctctcggtctggttgaggaaggcgctaagacggctcctggaaagaagagaccggtagagccatcaccccagcgttctccagactcctctacgggcatcggcaagaaaggccaacagcccgccagaaaaagactcaattttggtcagactggcgactcagagtcagttccagaccctcaacctctcggagaacctccagcagcgccctctggtgtgggacctaatacaatggctgcaggcggtggcgcaccaatggcagacaataacgaaggcgccgacggagtgggtagttcctcgggaaattggcattgcgattccacatggctgggcgacagagtcatcaccaccagcacccgaacctgggccctgcccacctacaacaaccacctctacaagcaaatctccaacgggacatcgggaggagccaccaacgacaacacctacttcggctacagcaccccctgggggtattttgactttaacagattccactgccacttttcaccacgtgactggcagcgactcatcaacaacaactggggattccggcccaagagactcagcttcaagctcttcaacatccaggtcaaggaggtcacgcagaatgaaggcaccaagaccatcgccaataacctcaccagcaccatccaggtgtttacggactcggagtaccagctgccgtacgttctcggctctgcccaccagggctgcctgcctccgttcccggcggacgtgttcatgattccccagtacggctacctaacactcaacaacggtagtcaggccgtgggacgctcctccttctactgcctggaatactttccttcgcagatgctgagaaccggcaacaacttccagtttacttacaccttcgaggacgtgcctttccacagcagctacgcccacagccagagcttggaccggctgatgaatcctctgattgaccagtacctgtactacttgtctcggactcaaacaacaggaggcacggcaaatacgcagactctgggcttcagccaaggtgggcctaatacaatggccaatcaggcaaagaactggctgccaggaccctgttaccgccaacaacgcgtctcaacgacaaccgggcaaaacaacaatagcaactttgcctggactgctgggaccaaataccatctgaatggaagaaattcattggctaatcctggcatcgctatggcaacacacaaagacgacgaggagcgtttttttcccagtaacgggatcctgatttttggcaaacaaaatgctgccagagacaatgcggattacagcgatgtcatgctcaccagcgaggaagaaatcaaaaccactaaccctgtggctacggagcagtacggatatgtgtcaaataatttgcaaaactcaaatactggtccaactactggaactgtcaatcaccaaggagcgttacctggtatggtgtggcaggatcgagacgtgtacctgcagggtcccatctgggccaagattcctcacacggacggcaacttccacccgtctccgctgatgggcggctttggcctgaaacatcctccgcctcagatcctgatcaagaacacgcctgtacctgcggatcctccgaccaccttcaaccagtcaaagctgaactctttcatcacgcaatacagcaccggacaggtcagcgtggaaattgaatgggagctgcagaaggaaaacagcaagcgctggaaccccgagatccagtacacctccaactactacaaatctacaagtgtggactttgctgttaatacagaaggcgtgtactctgaaccccgccccattggcacccgttacctcacccgtaatctgtaa

SEQ ID NO: 99 - protein, 738 aa, artificial sequence; identical to SEQ ID NO: 43
  Synthetic Construct

SEQ ID NO: 100 - DNA, 2217 bp, artificial sequence
  synthetic polynucleotide encoding AAV8-mut.HVR11
  CDS (1)..(2217)
atggctgccgatggttatcttccagattggctcgaggacaacctctctgagggcattcgcgagtggtgggcgctgaaacctggagccccgaagcccaaagccaaccagcaaaagcaggacgacggccggggtctggtgcttcctggctacaagtacctcggacccttcaacggactcgacaagggggagcccgtcaacgcggcggacgcagcggccctcgagcacgacaaggcctacgaccagcagctgcaggcgggtgacaatccgtacctgcggtataaccacgccgacgccgagtttcaggagcgtctgcaagaagatacgtcttttgggggcaacctcgggcgagcagtcttccaggccaagaagcgggttctcgaacctctcggtctggttgaggaaggcgctaagacggctcctggaaagaagagaccggtagagccatcaccccagcgttctccagactcctctacgggcatcggcaagaaaggccaacagcccgccagaaaaagactcaattttggtcagactggcgactcagagtcagttccagaccctcaacctctcggagaacctccagcagcgccctctggtgtgggacctaatacaatggctgcaggcggtggcgcaccaatggcagacaataacgaaggcgccgacggagtgggtagttcctcgggaaattggcattgcgattccacatggctgggcgacagagtcatcaccaccagcacccgaacctgggccctgcccacctacaacaaccacctctacaagcaaatctccaacgggacatcgggaggagccaccaacgacaacacctacttcggctacagcaccccctgggggtattttgactttaacagattccactgccacttttcaccacgtgactggcagcgactcatcaacaacaactggggattccggcccaagagactcagcttcaagctcttcaacatccaggtcaaggaggtcacgcagaatgaaggcaccaagaccatcgccaataacctcaccagcaccatccaggtgtttacggactcggagtaccagctgccgtacgttctcggctctgcccaccagggctgcctgcctccgttcccggcggacgtgttcatgattccccagtacggctacctaacactcaacaacggtagtcaggccgtgggacgctcctccttctactgcctggaatactttccttcgcagatgctgagaaccggcaacaacttccagtttacttacaccttcgaggacgtgcctttccacagcagctacgcccacagccagagcttggaccggctgatgaatcctctgattgaccagtacctgtactacttgtctcggactcaaacaacaggaggcacggcaaatacgcagactctgggcttcagccaaggtgggcctaatacaatggccaatcaggcaaagaactggctgccaggaccctgttaccgccaacaacgcgtctcaacgacaaccgggcaaaacaacaatagcaactttgcctggactgctgggaccaaataccatctgaatggaagaaattcattggctaatcctggcatcgctatggcaacacacaaagacgacgaggagcgtttttttcccagtaacgggatcctgatttttggcaaacaaaatgctgccagagacaatgcggattacagcgatgtcatgctcaccagcgaggaagaaatcaaaaccactaaccctgtggctacagaggaatacggtatcgtggcagataacttgcagcagcaaaacacggctcctcaaattggaactgtcaacagccagggggccttacccggtatggtctggcagaaccgggacgtgtacctgcagggtcccatctgggccaagattcctcacaccgatggacactttcatccttctccactgatgggaggttttgggctcaaacacccgcctcctcagatcatgatcaaaaacactcccgttccagccaatcctcctacaaacttcagttctgccaagtttgcttctttcatcacacagtattccacggggcaggtcagcgtggagatcgagtgggagctgcagaaggaaaacagcaagcgctggaaccccgagatccagtacacctccaactactacaaatctacaagtgtggactttgctgttaatacagaaggcgtgtactctgaaccccgccccattggcacccgttacctcacccgtaatctgtaa

SEQ ID NO: 101 - protein, 738 aa, artificial sequence; identical to SEQ ID NO: 44
  Synthetic Construct

SEQ ID NO: 102 - DNA, 2217 bp, artificial sequence
  synthetic polynucleotide encoding AAV8-mut.HVR12
  CDS (1)..(2217)
atggctgccgatggttatcttccagattggctcgaggacaacctctctgagggcattcgcgagtggtgggcgctgaaacctggagccccgaagcccaaagccaaccagcaaaagcaggacgacggccggggtctggtgcttcctggctacaagtacctcggacccttcaacggactcgacaagggggagcccgtcaacgcggcggacgcagcggccctcgagcacgacaaggcctacgaccagcagctgcaggcgggtgacaatccgtacctgcggtataaccacgccgacgccgagtttcaggagcgtctgcaagaagatacgtcttttgggggcaacctcgggcgagcagtcttccaggccaagaagcgggttctcgaacctctcggtctggttgaggaaggcgctaagacggctcctggaaagaagagaccggtagagccatcaccccagcgttctccagactcctctacgggcatcggcaagaaaggccaacagcccgccagaaaaagactcaattttggtcagactggcgactcagagtcagttccagaccctcaacctctcggagaacctccagcagcgccctctggtgtgggacctaatacaatggctgcaggcggtggcgcaccaatggcagacaataacgaaggcgccgacggagtgggtagttcctcgggaaattggcattgcgattccacatggctgggcgacagagtcatcaccaccagcacccgaacctgggccctgcccacctacaacaaccacctctacaagcaaatctccaacgggacatcgggaggagccaccaacgacaacacctacttcggctacagcaccccctgggggtattttgactttaacagattccactgccacttttcaccacgtgactggcagcgactcatcaacaacaactggggattccggcccaagagactcagcttcaagctcttcaacatccaggtcaaggaggtcacgcagaatgaaggcaccaagaccatcgccaataacctcaccagcaccatccaggtgtttacggactcggagtaccagctgccgtacgttctcggctctgcccaccagggctgcctgcctccgttcccggcggacgtgttcatgattccccagtacggctacctaacactcaacaacggtagtcaggccgtgggacgctcctccttctactgcctggaatactttccttcgcagatgctgagaaccggcaacaacttccagtttacttacaccttcgaggacgtgcctttccacagcagctacgcccacagccagagcttggaccggctgatgaatcctctgattgaccagtacctgtactacttgtctcggactcaaacaacaggaggcacggcaaatacgcagactctgggcttcagccaaggtgggcctaatacaatggccaatcaggcaaagaactggctgccaggaccctgttaccgccaacaacgcgtctcaacgacaaccgggcaaaacaacaatagcaactttgcctggactgctgggaccaaataccatctgaatggaagaaattcattggctaatcctggcatcgctatggcaacacacaaagacgacgaggagcgtttttttcccagtaacgggatcctgatttttggcaaacaaaatgctgccagagacaatgcggattacagcgatgtcatgctcaccagcgaggaagaaatcaaaaccactaaccctgtggctacagaggaatacggtatcgtggcagataacttgcagcagcaaaacacggctcctcaaattggaactgtcaacagccagggggccttacccggtatggtctggcagaaccgggacgtgtacctgcagggtcccatctgggccaagattcctcacacggacggcaacttccacccgtctccgctgatgggcggctttggcctgaaacatcctccgcctcagatcctgatcaagaacacgcctgtacctgcggatcctccgaccaccttcaaccagtcaaagctgaactctttcatcacgcaatacagcaccggacaggtcagcgtggaaattgaatgggagctgcagaaggagaacagcaaacgctggaatcccgagattcagtacacttccaactacaacaaatctgttaatgtggactttactgtggacactaatggtgtgtattcagagcctcgccccattggcaccagatacctgactcgtaatctgtaa

SEQ ID NO: 103 - protein, 738 aa, artificial sequence; identical to SEQ ID NO: 45
  Synthetic Construct

SEQ ID NO: 104 - DNA, 2217 bp, artificial sequence
  synthetic polynucleotide encoding Mutant5-AAV2
  CDS (1)..(2217)
atggctgccgatggttatcttccagattggctcgaggacaacctctctgagggcattcgcgagtggtgggcgctgaaacctggagccccgaagcccaaagccaaccagcaaaagcaggacgacggccggggtctggtgcttcctggctacaagtacctcggacccttcaacggactcgacaagggggagcccgtcaacgcggcggacgcagcggccctcgagcacgacaaggcctacgaccagcagctgcaggcgggtgacaatccgtacctgcggtataaccacgccgacgccgagtttcaggagcgtctgcaagaagatacgtcttttgggggcaacctcgggcgagcagtcttccaggccaagaagcgggttctcgaacctctcggtctggttgaggaaggcgctaagacggctcctggaaagaagagaccggtagagccatcaccccagcgttctccagactcctctacgggcatcggcaagaaaggccaacagcccgccagaaaaagactcaattttggtcagactggcgactcagagtcagttccagaccctcaacctctcggagaacctccagcagcgccctctggtgtgggacctaatacaatggctgcaggcggtggcgcaccaatggcagacaataacgaaggcgccgacggagtgggtagttcctcgggaaattggcattgcgattccacatggctgggcgacagagtcatcaccaccagcacccgaacctgggccctgcccacctacaacaaccacctctacaagcaaatctccaacgggacatcgggaggagccaccaacgacaacacctacttcggctacagcaccccctgggggtattttgactttaacagattccactgccacttttcaccacgtgactggcagcgactcatcaacaacaactggggattccggcccaagagactcagcttcaagctcttcaacatccaggtcaaggaggtcacgcagaatgaaggcaccaagaccatcgccaataacctcaccagcaccatccaggtgtttacggactcggagtaccagctgccgtacgttctcggctctgcccaccagggctgcctgcctccgttcccggcggacgtgttcatgattccccagtacggctacctaacactcaacaacggtagtcaggccgtgggacgctcctccttctactgcctggaatactttccttcgcagatgctgagaaccggcaacaacttccagtttacttacaccttcgaggacgtgcctttccacagcagctacgcccacagccagagcttggaccggctgatgaatcctctgattgaccagtacctgtattacttgagcagaacaaacactccaagtggaaccaccacgcagtcaaggcttcagttttctcaggccggagcgagtgacattcgggaccagtctaggaactggcttcctggaccctgttaccgccaacaacgcgtctcaacgacaaccgggcaaaacaacaatagcaactttgcctggactgctgggaccaaataccatctgaatggaagaaattcattggctaatcctggcatcgctatggcaacacacaaagacgacgaggagcgtttttttcccagtaacgggatcctgatttttggcaaacaaaatgctgccagagacaatgcggattacagcgatgtcatgctcaccagcgaggaagaaatcaaaaccactaaccctgtggctacagaggaatacggtatcgtggcagataacttgcagcagcaaaacacggctcctcaaattggaactgtcaacagccagggggccttacccggtatggtctggcagaaccgggacgtgtacctgcagggtcccatctgggccaagattcctcacacggacggcaacttccacccgtctccgctgatgggcggctttggcctgaaacatcctccgcctcagatcctgatcaagaacacgcctgtacctgcggatcctccgaccaccttcaaccagtcaaagctgaactctttcatcacgcaatacagcaccggacaggtcagcgtggaaattgaatgggagctgcagaaggaaaacagcaagcgctggaaccccgagatccagtacacctccaactactacaaatctacaagtgtggactttgctgttaatacagaaggcgtgtactctgaaccccgccccattggcacccgttacctcacccgtaatctgtaa

SEQ ID NO: 105 - protein, 738 aa, artificial sequence; identical to SEQ ID NO: 46
  Synthetic Construct

SEQ ID NO: 106 - DNA, 2217 bp, artificial sequence
  synthetic polynucleotide encoding Mutant5-#1704
  CDS (1)..(2217)
atggctgccgatggttatcttccagattggctcgaggacaacctctctgagggcattcgcgagtggtgggcgctgaaacctggagccccgaagcccaaagccaaccagcaaaagcaggacgacggccggggtctggtgcttcctggctacaagtacctcggacccttcaacggactcgacaagggggagcccgtcaacgcggcggacgcagcggccctcgagcacgacaaggcctacgaccagcagctgcaggcgggtgacaatccgtacctgcggtataaccacgccgacgccgagtttcaggagcgtctgcaagaagatacgtcttttgggggcaacctcgggcgagcagtcttccaggccaagaagcgggttctcgaacctctcggtctggttgaggaaggcgctaagacggctcctggaaagaagagaccggtagagccatcaccccagcgttctccagactcctctacgggcatcggcaagaaaggccaacagcccgccagaaaaagactcaattttggtcagactggcgactcagagtcagttccagaccctcaacctctcggagaacctccagcagcgccctctggtgtgggacctaatacaatggctgcaggcggtggcgcaccaatggcagacaataacgaaggcgccgacggagtgggtagttcctcgggaaattggcattgcgattccacatggctgggcgacagagtcatcaccaccagcacccgaacctgggccctgcccacctacaacaaccacctctacaagcaaatctccaacgggacatcgggaggagccaccaacgacaacacctacttcggctacagcaccccctgggggtattttgactttaacagattccactgccacttttcaccacgtgactggcagcgactcatcaacaacaactggggattccggcccaagagactcagcttcaagctcttcaacatccaggtcaaggaggtcacgcagaatgaaggcaccaagaccatcgccaataacctcaccagcaccatccaggtgtttacggactcggagtaccagctgccgtacgttctcggctctgcccaccagggctgcctgcctccgttcccggcggacgtgttcatgattccccagtacggctacctaacactcaacaacggtagtcaggccgtgggacgctcctccttctactgcctggaatactttccttcgcagatgctgagaaccggcaacaacttccagtttacttacaccttcgaggacgtgcctttccacagcagctacgcccacagccagagcttggaccggctgatgaatcctctgattgaccagtacctgtattatctgaacaagacacaaacaaatagtggaactcttcagcagtctcggctactgtttagtcaagctggacccaccagcatgtctcttcaagctaaaaactggctgcctggaccttgctaccgccaacaacgcgtctcaacgacaaccgggcaaaacaacaatagcaactttgcctggactgctgggaccaaataccatctgaatggaagaaattcattggctaatcctggcatcgctatggcaacacacaaagacgacgaggagcgtttttttcccagtaacgggatcctgatttttggcaaacaaaatgctgccagagacaatgcggattacagcgatgtcatgctcaccagcgaggaagaaatcaaaaccactaaccctgtggctacagaggaatacggtatcgtggcagataacttgcagcagcaaaacacggctcctcaaattggaactgtcaacagccagggggccttacccggtatggtctggcagaaccgggacgtgtacctgcagggtcccatctgggccaagattcctcacacggacggcaacttccacccgtctccgctgatgggcggctttggcctgaaacatcctccgcctcagatcctgatcaagaacacgcctgtacctgcggatcctccgaccaccttcaaccagtcaaagctgaactctttcatcacgcaatacagcaccggacaggtcagcgtggaaattgaatgggagctgcagaaggaaaacagcaagcgctggaaccccgagatccagtacacctccaactactacaaatctacaagtgtggactttgctgttaatacagaaggcgtgtactctgaaccccgccccattggcacccgttacctcacccgtaatctgtaa

SEQ ID NO: 107 - protein, 738 aa, artificial sequence; identical to SEQ ID NO: 47
  Synthetic Construct

SEQ ID NO: 108 - DNA, 2217 bp, artificial sequence
  synthetic polynucleotide coding for Mutant5-#3086
  CDS (1)..(2217)
atggctgccgatggttatcttccagattggctcgaggacaacctctctgagggcattcgcgagtggtgggcgctgaaacctggagccccgaagcccaaagccaaccagcaaaagcaggacgacggccggggtctggtgcttcctggctacaagtacctcggacccttcaacggactcgacaagggggagcccgtcaacgcggcggacgcagcggccctcgagcacgacaaggcctacgaccagcagctgcaggcgggtgacaatccgtacctgcggtataaccacgccgacgccgagtttcaggagcgtctgcaagaagatacgtcttttgggggcaacctcgggcgagcagtcttccaggccaagaagcgggttctcgaacctctcggtctggttgaggaaggcgctaagacggctcctggaaagaagagaccggtagagccatcaccccagcgttctccagactcctctacgggcatcggcaagaaaggccaacagcccgccagaaaaagactcaattttggtcagactggcgactcagagtcagttccagaccctcaacctctcggagaacctccagcagcgccctctggtgtgggacctaatacaatggctgcaggcggtggcgcaccaatggcagacaataacgaaggcgccgacggagtgggtagttcctcgggaaattggcattgcgattccacatggctgggcgacagagtcatcaccaccagcacccgaacctgggccctgcccacctacaacaaccacctctacaagcaaatctccaacgggacatcgggaggagccaccaacgacaacacctacttcggctacagcaccccctgggggtattttgactttaacagattccactgccacttttcaccacgtgactggcagcgactcatcaacaacaactggggattccggcccaagagactcagcttcaagctcttcaacatccaggtcaaggaggtcacgcagaatgaaggcaccaagaccatcgccaataacctcaccagcaccatccaggtgtttacggactcggagtaccagctgccgtacgttctcggctctgcccaccagggctgcctgcctccgttcccggcggacgtgttcatgattccccagtacggctacctaacactcaacaacggtagtcaggccgtgggacgctcctccttctactgcctggaatactttccttcgcagatgctgagaaccggcaacaacttccagtttacttacaccttcgaggacgtgcctttccacagcagctacgcccacagccagagcttggaccggctgatgaatcctctgattgaccagtacctgtattatctgaacaagacacaatcaaatagtggaactcttcagcagtctcggctactgtttagccaagctggacccaccaacatgtctcttcaagctaaaaactggctgcctggaccttgctaccgccaacaacgcgtctcaacgacaaccgggcaaaacaacaatagcaactttgcctggactgctgggaccaaataccatctgaatggaagaaattcattggctaatcctggcatcgctatggcaacacacaaagacgacgaggagcgtttttttcccagtaacgggatcctgatttttggcaaacaaaatgctgccagagacaatgcggattacagcgatgtcatgctcaccagcgaggaagaaatcaaaaccactaaccctgtggctacagaggaatacggtatcgtggcagataacttgcagcagcaaaacacggctcctcaaattggaactgtcaacagccagggggccttacccggtatggtctggcagaaccgggacgtgtacctgcagggtcccatctgggccaagattcctcacacggacggcaacttccacccgtctccgctgatgggcggctttggcctgaaacatcctccgcctcagatcctgatcaagaacacgcctgtacctgcggatcctccgaccaccttcaaccagtcaaagctgaactctttcatcacgcaatacagcaccggacaggtcagcgtggaaattgaatgggagctgcagaaggaaaacagcaagcgctggaaccccgagatccagtacacctccaactactacaaatctacaagtgtggactttgctgttaatacagaaggcgtgtactctgaaccccgccccattggcacccgttacctcacccgtaatctgtaa

SEQ ID NO: 109 - protein, 738 aa, artificial sequence; identical to SEQ ID NO: 48
  Synthetic Construct

SEQ ID NO: 110 - DNA, 2214 bp, artificial sequence
  synthetic polynucleotide coding for Mutant5-#508
  CDS (1)..(2214)
atggctgccgatggttatcttccagattggctcgaggacaacctctctgagggcattcgcgagtggtgggcgctgaaacctggagccccgaagcccaaagccaaccagcaaaagcaggacgacggccggggtctggtgcttcctggctacaagtacctcggacccttcaacggactcgacaagggggagcccgtcaacgcggcggacgcagcggccctcgagcacgacaaggcctacgaccagcagctgcaggcgggtgacaatccgtacctgcggtataaccacgccgacgccgagtttcaggagcgtctgcaagaagatacgtcttttgggggcaacctcgggcgagcagtcttccaggccaagaagcgggttctcgaacctctcggtctggttgaggaaggcgctaagacggctcctggaaagaagagaccggtagagccatcaccccagcgttctccagactcctctacgggcatcggcaagaaaggccaacagcccgccagaaaaagactcaattttggtcagactggcgactcagagtcagttccagaccctcaacctctcggagaacctccagcagcgccctctggtgtgggacctaatacaatggctgcaggcggtggcgcaccaatggcagacaataacgaaggcgccgacggagtgggtagttcctcgggaaattggcattgcgattccacatggctgggcgacagagtcatcaccaccagcacccgaacctgggccctgcccacctacaacaaccacctctacaagcaaatctccaacgggacatcgggaggagccaccaacgacaacacctacttcggctacagcaccccctgggggtattttgactttaacagattccactgccacttttcaccacgtgactggcagcgactcatcaacaacaactggggattccggcccaagagactcagcttcaagctcttcaacatccaggtcaaggaggtcacgcagaatgaaggcaccaagaccatcgccaataacctcaccagcaccatccaggtgtttacggactcggagtaccagctgccgtacgttctcggctctgcccaccagggctgcctgcctccgttcccggcggacgtgttcatgattccccagtacggctacctaacactcaacaacggtagtcaggccgtgggacgctcctccttctactgcctggaatactttccttcgcagatgctgagaaccggcaacaacttccagtttacttacaccttcgaggacgtgcctttccacagcagctacgcccacagccagagcttggaccggctgatgaatcctctgattgaccagtacctgtattatctaaacaggacacaaacagccagtggaactcagcagtctcggctactgtttagccaagctggacccaccagcatgtctcttcaagctaaaaactggctgcctggaccttgctaccgccaacaacgcgtctcaacgacaaccgggcaaaacaacaatagcaactttgcctggactgctgggaccaaataccatctgaatggaagaaattcattggctaatcctggcatcgctatggcaacacacaaagacgacgaggagcgtttttttcccagtaacgggatcctgatttttggcaaacaaaatgctgccagagacaatgcggattacagcgatgtcatgctcaccagcgaggaagaaatcaaaaccactaaccctgtggctacagaggaatacggtatcgtggcagataacttgcagcagcaaaacacggctcctcaaattggaactgtcaacagccagggggccttacccggtatggtctggcagaaccgggacgtgtacctgcagggtcccatctgggccaagattcctcacacggacggcaacttccacccgtctccgctgatgggcggctttggcctgaaacatcctccgcctcagatcctgatcaagaacacgcctgtacctgcggatcctccgaccaccttcaaccagtcaaagctgaactctttcatcacgcaatacagcaccggacaggtcagcgtggaaattgaatgggagctgcagaaggaaaacagcaagcgctggaaccccgagatccagtacacctccaactactacaaatctacaagtgtggactttgctgttaatacagaaggcgtgtactctgaaccccgccccattggcacccgttacctcacccgtaatctgtaa

SEQ ID NO: 111 - protein, 737 aa, artificial sequence; identical to SEQ ID NO: 49
  Synthetic Construct

SEQ ID NO: 112 - DNA, 2217 bp, artificial sequence
  synthetic polynucleotide coding for Mutant5-#3142
  CDS (1)..(2217)
atggctgccgatggttatcttccagattggctcgaggacaacctctctgagggcattcgcgagtggtgggcgctgaaacctggagccccgaagcccaaagccaaccagcaaaagcaggacgacggccggggtctggtgcttcctggctacaagtacctcggacccttcaacggactcgacaagggggagcccgtcaacgcggcggacgcagcggccctcgagcacgacaaggcctacgaccagcagctgcaggcgggtgacaatccgtacctgcggtataaccacgccgacgccgagtttcaggagcgtctgcaagaagatacgtcttttgggggcaacctcgggcgagcagtcttccaggccaagaagcgggttctcgaacctctcggtctggttgaggaaggcgctaagacggctcctggaaagaagagaccggtagagccatcaccccagcgttctccagactcctctacgggcatcggcaagaaaggccaacagcccgccagaaaaagactcaattttggtcagactggcgactcagagtcagttccagaccctcaacctctcggagaacctccagcagcgccctctggtgtgggacctaatacaatggctgcaggcggtggcgcaccaatggcagacaataacgaaggcgccgacggagtgggtagttcctcgggaaattggcattgcgattccacatggctgggcgacagagtcatcaccaccagcacccgaacctgggccctgcccacctacaacaaccacctctacaagcaaatctccaacgggacatcgggaggagccaccaacgacaacacctacttcggctacagcaccccctgggggtattttgactttaacagattccactgccacttttcaccacgtgactggcagcgactcatcaacaacaactggggattccggcccaagagactcagcttcaagctcttcaacatccaggtcaaggaggtcacgcagaatgaaggcaccaagaccatcgccaataacctcaccagcaccatccaggtgtttacggactcggagtaccagctgccgtacgttctcggctctgcccaccagggctgcctgcctccgttcccggcggacgtgttcatgattccccagtacggctacctaacactcaacaacggtagtcaggccgtgggacgctcctccttctactgcctggaatactttccttcgcagatgctgagaaccggcaacaacttccagtttacttacaccttcgaggacgtgcctttccacagcagctacgcccacagccagagcttggaccggctgatgaatcctctgattgaccagtacctgtattatctgaacaagacacaatcaaatagtggaactgttcagcagtctcggctactgtttagccaagctggacccaccagcatgtctcttcaagctaaaaactggctgcctggaccttgctaccgccaacaacgcgtctcaacgacaaccgggcaaaacaacaatagcaactttgcctggactgctgggaccaaataccatctgaatggaagaaattcattggctaatcctggcatcgctatggcaacacacaaagacgacgaggagcgtttttttcccagtaacgggatcctgatttttggcaaacaaaatgctgccagagacaatgcggattacagcgatgtcatgctcaccagcgaggaagaaatcaaaaccactaaccctgtggctacagaggaatacggtatcgtggcagataacttgcagcagcaaaacacggctcctcaaattggaactgtcaacagccagggggccttacccggtatggtctggcagaaccgggacgtgtacctgcagggtcccatctgggccaagattcctcacacggacggcaacttccacccgtctccgctgatgggcggctttggcctgaaacatcctccgcctcagatcctgatcaagaacacgcctgtacctgcggatcctccgaccaccttcaaccagtcaaagctgaactctttcatcacgcaatacagcaccggacaggtcagcgtggaaattgaatgggagctgcagaaggaaaacagcaagcgctggaaccccgagatccagtacacctccaactactacaaatctacaagtgtggactttgctgttaatacagaaggcgtgtactctgaaccccgccccattggcacccgttacctcacccgtaatctgtaa

SEQ ID NO: 113 - protein, 738 aa, artificial sequence; identical to SEQ ID NO: 50
  Synthetic Construct

SEQ ID NO: 114 - DNA, 2217 bp, artificial sequence
  synthetic polynucleotide coding for Mutant5-#M258
  CDS (1)..(2217)
atggctgccgatggttatcttccagattggctcgaggacaacctctctgagggcattcgcgagtggtgggcgctgaaacctggagccccgaagcccaaagccaaccagcaaaagcaggacgacggccggggtctggtgcttcctggctacaagtacctcggacccttcaacggactcgacaagggggagcccgtcaacgcggcggacgcagcggccctcgagcacgacaaggcctacgaccagcagctgcaggcgggtgacaatccgtacctgcggtataaccacgccgacgccgagtttcaggagcgtctgcaagaagatacgtcttttgggggcaacctcgggcgagcagtcttccaggccaagaagcgggttctcgaacctctcggtctggttgaggaaggcgctaagacggctcctggaaagaagagaccggtagagccatcaccccagcgttctccagactcctctacgggcatcggcaagaaaggccaacagcccgccagaaaaagactcaattttggtcagactggcgactcagagtcagttccagaccctcaacctctcggagaacctccagcagcgccctctggtgtgggacctaatacaatggctgcaggcggtggcgcaccaatggcagacaataacgaaggcgccgacggagtgggtagttcctcgggaaattggcattgcgattccacatggctgggcgacagagtcatcaccaccagcacccgaacctgggccctgcccacctacaacaaccacctctacaagcaaatctccaacgggacatcgggaggagccaccaacgacaacacctacttcggctacagcaccccctgggggtattttgactttaacagattccactgccacttttcaccacgtgactggcagcgactcatcaacaacaactggggattccggcccaagagactcagcttcaagctcttcaacatccaggtcaaggaggtcacgcagaatgaaggcaccaagaccatcgccaataacctcaccagcaccatccaggtgtttacggactcggagtaccagctgccgtacgttctcggctctgcccaccagggctgcctgcctccgttcccggcggacgtgttcatgattccccagtacggctacctaacactcaacaacggtagtcaggccgtgggacgctcctccttctactgcctggaatactttccttcgcagatgctgagaaccggcaacaacttccagtttacttacaccttcgaggacgtgcctttccacagcagctacgcccacagccagagcttggaccggctgatgaatcctctgattgaccagtacctgtattatctgaacaagacacaatcagccagtggaactgttcagcagtctcggctactgtttagccaagctggacccaccagcatgtctcttcaagctaaaaactggctgcctggaccttgctaccgccaacaacgcgtctcaacgacaaccgggcaaaacaacaatagcaactttgcctggactgctgggaccaaataccatctgaatggaagaaattcattggctaatcctggcatcgctatggcaacacacaaagacgacgaggagcgtttttttcccagtaacgggatcctgatttttggcaaacaaaatgctgccagagacaatgcggattacagcgatgtcatgctcaccagcgaggaagaaatcaaaaccactaaccctgtggctacagaggaatacggtatcgtggcagataacttgcagcagcaaaacacggctcctcaaattggaactgtcaacagccagggggccttacccggtatggtctggcagaaccgggacgtgtacctgcagggtcccatctgggccaagattcctcacacggacggcaacttccacccgtctccgctgatgggcggctttggcctgaaacatcctccgcctcagatcctgatcaagaacacgcctgtacctgcggatcctccgaccaccttcaaccagtcaaagctgaactctttcatcacgcaatacagcaccggacaggtcagcgtggaaattgaatgggagctgcagaaggaaaacagcaagcgctggaaccccgagatccagtacacctccaactactacaaatctacaagtgtggactttgctgttaatacagaaggcgtgtactctgaaccccgccccattggcacccgttacctcacccgtaatctgtaa

SEQ ID NO: 115 - protein, 738 aa, artificial sequence; identical to SEQ ID NO: 51
  Synthetic Construct

SEQ ID NO: 116 - DNA, 2217 bp, artificial sequence
  synthetic polynucleotide coding for Mutant5-#1570
  CDS (1)..(2217)
atggctgccgatggttatcttccagattggctcgaggacaacctctctgagggcattcgcgagtggtgggcgctgaaacctggagccccgaagcccaaagccaaccagcaaaagcaggacgacggccggggtctggtgcttcctggctacaagtacctcggacccttcaacggactcgacaagggggagcccgtcaacgcggcggacgcagcggccctcgagcacgacaaggcctacgaccagcagctgcaggcgggtgacaatccgtacctgcggtataaccacgccgacgccgagtttcaggagcgtctgcaagaagatacgtcttttgggggcaacctcgggcgagcagtcttccaggccaagaagcgggttctcgaacctctcggtctggttgaggaaggcgctaagacggctcctggaaagaagagaccggtagagccatcaccccagcgttctccagactcctctacgggcatcggcaagaaaggccaacagcccgccagaaaaagactcaattttggtcagactggcgactcagagtcagttccagaccctcaacctctcggagaacctccagcagcgccctctggtgtgggacctaatacaatggctgcaggcggtggcgcaccaatggcagacaataacgaaggcgccgacggagtgggtagttcctcgggaaattggcattgcgattccacatggctgggcgacagagtcatcaccaccagcacccgaacctgggccctgcccacctacaacaaccacctctacaagcaaatctccaacgggacatcgggaggagccaccaacgacaacacctacttcggctacagcaccccctgggggtattttgactttaacagattccactgccacttttcaccacgtgactggcagcgactcatcaacaacaactggggattccggcccaagagactcagcttcaagctcttcaacatccaggtcaaggaggtcacgcagaatgaaggcaccaagaccatcgccaataacctcaccagcaccatccaggtgtttacggactcggagtaccagctgccgtacgttctcggctctgcccaccagggctgcctgcctccgttcccggcggacgtgttcatgattccccagtacggctacctaacactcaacaacggtagtcaggccgtgggacgctcctccttctactgcctggaatactttccttcgcagatgctgagaaccggcaacaacttccagtttacttacaccttcgaggacgtgcctttccacagcagctacgcccacagccagagcttggaccggctgatgaatcctctgattgaccagtacctgtattatctgaacaaaacacaagcaaatagtggaactcttcagcagtctcggctactgtttagtcaagctggacccaccagcatgtctcttcaagctaaaaactggctgcctggaccttgctaccgccaacaacgcgtctcaacgacaaccgggcaaaacaacaatagcaactttgcctggactgctgggaccaaataccatctgaatggaagaaattcattggctaatcctggcatcgctatggcaacacacaaagacgacgaggagcgtttttttcccagtaacgggatcctgatttttggcaaacaaaatgctgccagagacaatgcggattacagcgatgtcatgctcaccagcgaggaagaaatcaaaaccactaaccctgtggctacagaggaatacggtatcgtggcagataacttgcagcagcaaaacacggctcctcaaattggaactgtcaacagccagggggccttacccggtatggtctggcagaaccgggacgtgtacctgcagggtcccatctgggccaagattcctcacacggacggcaacttccacccgtctccgctgatgggcggctttggcctgaaacatcctccgcctcagatcctgatcaagaacacgcctgtacctgcggatcctccgaccaccttcaaccagtcaaagctgaactctttcatcacgcaatacagcaccggacaggtcagcgtggaaattgaatgggagctgcagaaggaaaacagcaagcgctggaaccccgagatccagtacacctccaactactacaaatctacaagtgtggactttgctgttaatacagaaggcgtgtactctgaaccccgccccattggcacccgttacctcacccgtaatctgtaa

SEQ ID NO: 117 - protein, 738 aa, artificial sequence; identical to SEQ ID NO: 52
  Synthetic Construct

SEQ ID NO: 118 - DNA, 2217 bp, artificial sequence
  synthetic polynucleotide coding for Mutant5-#2731
  CDS (1)..(2217)
atggctgccgatggttatcttccagattggctcgaggacaacctctctgagggcattcgcgagtggtgggcgctgaaacctggagccccgaagcccaaagccaaccagcaaaagcaggacgacggccggggtctggtgcttcctggctacaagtacctcggacccttcaacggactcgacaagggggagcccgtcaacgcggcggacgcagcggccctcgagcacgacaaggcctacgaccagcagctgcaggcgggtgacaatccgtacctgcggtataaccacgccgacgccgagtttcaggagcgtctgcaagaagatacgtcttttgggggcaacctcgggcgagcagtcttccaggccaagaagcgggttctcgaacctctcggtctggttgaggaaggcgctaagacggctcctggaaagaagagaccggtagagccatcaccccagcgttctccagactcctctacgggcatcggcaagaaaggccaacagcccgccagaaaaagactcaattttggtcagactggcgactcagagtcagttccagaccctcaacctctcggagaacctccagcagcgccctctggtgtgggacctaatacaatggctgcaggcggtggcgcaccaatggcagacaataacgaaggcgccgacggagtgggtagttcctcgggaaattggcattgcgattccacatggctgggcgacagagtcatcaccaccagcacccgaacctgggccctgcccacctacaacaaccacctctacaagcaaatctccaacgggacatcgggaggagccaccaacgacaacacctacttcggctacagcaccccctgggggtattttgactttaacagattccactgccacttttcaccacgtgactggcagcgactcatcaacaacaactggggattccggcccaagagactcagcttcaagctcttcaacatccaggtcaaggaggtcacgcagaatgaaggcaccaagaccatcgccaataacctcaccagcaccatccaggtgtttacggactcggagtaccagctgccgtacgttctcggctctgcccaccagggctgcctgcctccgttcccggcggacgtgttcatgattccccagtacggctacctaacactcaacaacggtagtcaggccgtgggacgctcctccttctactgcctggaatactttccttcgcagatgctgagaaccggcaacaacttccagtttacttacaccttcgaggacgtgcctttccacagcagctacgcccacagccagagcttggaccggctgatgaatcctctgattgaccagtacctgtattatctgaacaaaacacaatcaaatagtggaaccaccacgatgtcaaggctactgtttagtcaagctggacccaccagcatgtctcttcacgctaaaaactggctgcctggaccttgctaccgccaacaacgcgtctcaacgacaaccgggcaaaacaacaatagcaactttgcctggactgctgggaccaaataccatctgaatggaagaaattcattggctaatcctggcatcgctatggcaacacacaaagacgacgaggagcgtttttttcccagtaacgggatcctgatttttggcaaacaaaatgctgccagagacaatgcggattacagcgatgtcatgctcaccagcgaggaagaaatcaaaaccactaaccctgtggctacagaggaatacggtatcgtggcagataacttgcagcagcaaaacacggctcctcaaattggaactgtcaacagccagggggccttacccggtatggtctggcagaaccgggacgtgtacctgcagggtcccatctgggccaagattcctcacacggacggcaacttccacccgtctccgctgatgggcggctttggcctgaaacatcctccgcctcagatcctgatcaagaacacgcctgtacctgcggatcctccgaccaccttcaaccagtcaaagctgaactctttcatcacgcaatacagcaccggacaggtcagcgtggaaattgaatgggagctgcagaaggaaaacagcaagcgctggaaccccgagatccagtacacctccaactactacaaatctacaagtgtggactttgctgttaatacagaaggcgtgtactctgaaccccgccccattggcacccgttacctcacccgtaatctgtaa

SEQ ID NO: 119 - protein, 738 aa, artificial sequence
  Synthetic Construct
MAADGYLPDWLEDNLSEGIREWWALKPGAPKPKANQQKQDDGRGLVLPGYKYLGPFNGLDKGEPVNAADAAALEHDKAYDQQLQAGDNPYLRYNHADAEFQERLQEDTSFGGNLGRAVFQAKKRVLEPLGLVEEGAKTAPGKKRPVEPSPQRSPDSSTGIGKKGQQPARKRLNFGQTGDSESVPDPQPLGEPPAAPSGVGPNTMAAGGGAPMADNNEGADGVGSSSGNWHCDSTWLGDRVITTSTRTWALPTYNNHLYKQISNGTSGGATNDNTYFGYSTPWGYFDFNRFHCHFSPRDWQRLINNNWGFRPKRLSFKLFNIQVKEVTQNEGTKTIANNLTSTIQVFTDSEYQLPYVLGSAHQGCLPPFPADVFMIPQYGYLTLNNGSQAVGRSSFYCLEYFPSQMLRTGNNFQFTYTFEDVPFHSSYAHSQSLDRLMNPLIDQYLYYLNKTQSNSGTTTMSRLLFSQAGPTSMSLHAKNWLPGPCYRQQRVSTTTGQNNNSNFAWTAGTKYHLNGRNSLANPGIAMATHKDDEERFFPSNGILIFGKQNAARDNADYSDVMLTSEEEIKTTNPVATEEYGIVADNLQQQNTAPQIGTVNSQGALPGMVWQNRDVYLQGPIWAKIPHTDGNFHPSPLMGGFGLKHPPPQILIKNTPVPADPPTTFNQSKLNSFITQYSTGQVSVEIEWELQKENSKRWNPEIQYTSNYYKSTSVDFAVNTEGVYSEPRPIGTRYLTRNL

SEQ ID NO: 120 - DNA, 2217 bp, artificial sequence
  synthetic polynucloetide coding for Mutant5-#1602
  CDS (1)..(2217)
atggctgccgatggttatcttccagattggctcgaggacaacctctctgagggcattcgcgagtggtgggcgctgaaacctggagccccgaagcccaaagccaaccagcaaaagcaggacgacggccggggtctggtgcttcctggctacaagtacctcggacccttcaacggactcgacaagggggagcccgtcaacgcggcggacgcagcggccctcgagcacgacaaggcctacgaccagcagctgcaggcgggtgacaatccgtacctgcggtataaccacgccgacgccgagtttcaggagcgtctgcaagaagatacgtcttttgggggcaacctcgggcgagcagtcttccaggccaagaagcgggttctcgaacctctcggtctggttgaggaaggcgctaagacggctcctggaaagaagagaccggtagagccatcaccccagcgttctccagactcctctacgggcatcggcaagaaaggccaacagcccgccagaaaaagactcaattttggtcagactggcgactcagagtcagttccagaccctcaacctctcggagaacctccagcagcgccctctggtgtgggacctaatacaatggctgcaggcggtggcgcaccaatggcagacaataacgaaggcgccgacggagtgggtagttcctcgggaaattggcattgcgattccacatggctgggcgacagagtcatcaccaccagcacccgaacctgggccctgcccacctacaacaaccacctctacaagcaaatctccaacgggacatcgggaggagccaccaacgacaacacctacttcggctacagcaccccctgggggtattttgactttaacagattccactgccacttttcaccacgtgactggcagcgactcatcaacaacaactggggattccggcccaagagactcagcttcaagctcttcaacatccaggtcaaggaggtcacgcagaatgaaggcaccaagaccatcgccaataacctcaccagcaccatccaggtgtttacggactcggagtaccagctgccgtacgttctcggctctgcccaccagggctgcctgcctccgttcccggcggacgtgttcatgattccccagtacggctacctaacactcaacaacggtagtcaggccgtgggacgctcctccttctactgcctggaatactttccttcgcagatgctgagaaccggcaacaacttccagtttacttacaccttcgaggacgtgcctttccacagcagctacgcccacagccagagcttggaccggctgatgaatcctctgattgaccagtacctgtattatctgaacaagacacaaacaaatagtggaactcttcagcagtctcggctactgtttagccaagctggaccaaccaacatgtctcttcaagctaaaaactggctgcctggaccttgctaccgccaacaacgcgtctcaacgacaaccgggcaaaacaacaatagcaactttgcctggactgctgggaccaaataccatctgaatggaagaaattcattggctaatcctggcatcgctatggcaacacacaaagacgacgaggagcgtttttttcccagtaacgggatcctgatttttggcaaacaaaatgctgccagagacaatgcggattacagcgatgtcatgctcaccagcgaggaagaaatcaaaaccactaaccctgtggctacagaggaatacggtatcgtggcagataacttgcagcagcaaaacacggctcctcaaattggaactgtcaacagccagggggccttacccggtatggtctggcagaaccgggacgtgtacctgcagggtcccatctgggccaagattcctcacacggacggcaacttccacccgtctccgctgatgggcggctttggcctgaaacatcctccgcctcagatcctgatcaagaacacgcctgtacctgcggatcctccgaccaccttcaaccagtcaaagctgaactctttcatcacgcaatacagcaccggacaggtcagcgtggaaattgaatgggagctgcagaaggaaaacagcaagcgctggaaccccgagatccagtacacctccaactactacaaatctacaagtgtggactttgctgttaatacagaaggcgtgtactctgaaccccgccccattggcacccgttacctcacccgtaatctgtaa

SEQ ID NO: 121 - protein, 738 aa, artificial sequence; identical to SEQ ID NO: 54
  Synthetic Construct

SEQ ID NO: 122 - DNA, 2217 bp, artificial sequence
  synthetic polynucleotide coding for Mutant5-#667
  CDS (1)..(2217)
atggctgccgatggttatcttccagattggctcgaggacaacctctctgagggcattcgcgagtggtgggcgctgaaacctggagccccgaagcccaaagccaaccagcaaaagcaggacgacggccggggtctggtgcttcctggctacaagtacctcggacccttcaacggactcgacaagggggagcccgtcaacgcggcggacgcagcggccctcgagcacgacaaggcctacgaccagcagctgcaggcgggtgacaatccgtacctgcggtataaccacgccgacgccgagtttcaggagcgtctgcaagaagatacgtcttttgggggcaacctcgggcgagcagtcttccaggccaagaagcgggttctcgaacctctcggtctggttgaggaaggcgctaagacggctcctggaaagaagagaccggtagagccatcaccccagcgttctccagactcctctacgggcatcggcaagaaaggccaacagcccgccagaaaaagactcaattttggtcagactggcgactcagagtcagttccagaccctcaacctctcggagaacctccagcagcgccctctggtgtgggacctaatacaatggctgcaggcggtggcgcaccaatggcagacaataacgaaggcgccgacggagtgggtagttcctcgggaaattggcattgcgattccacatggctgggcgacagagtcatcaccaccagcacccgaacctgggccctgcccacctacaacaaccacctctacaagcaaatctccaacgggacatcgggaggagccaccaacgacaacacctacttcggctacagcaccccctgggggtattttgactttaacagattccactgccacttttcaccacgtgactggcagcgactcatcaacaacaactggggattccggcccaagagactcagcttcaagctcttcaacatccaggtcaaggaggtcacgcagaatgaaggcaccaagaccatcgccaataacctcaccagcaccatccaggtgtttacggactcggagtaccagctgccgtacgttctcggctctgcccaccagggctgcctgcctccgttcccggcggacgtgttcatgattccccagtacggctacctaacactcaacaacggtagtcaggccgtgggacgctcctccttctactgcctggaatactttccttcgcagatgctgagaaccggcaacaacttccagtttacttacaccttcgaggacgtgcctttccacagcagctacgcccacagccagagcttggaccggctgatgaatcctctgattgaccagtacctgtattacttgagcagaacaaacactccaagtggaaccaccacgcagtctcggctactgtttagtcaagctggacccaccagcatgtctcttcaagctaaaaactggctgcctggaccttgctaccgccaacaacgcgtctcaacgacaaccgggcaaaacaacaatagcaactttgcctggactgctgggaccaaataccatctgaatggaagaaattcattggctaatcctggcatcgctatggcaacacacaaagacgacgaggagcgtttttttcccagtaacgggatcctgatttttggcaaacaaaatgctgccagagacaatgcggattacagcgatgtcatgctcaccagcgaggaagaaatcaaaaccactaaccctgtggctacagaggaatacggtatcgtggcagataacttgcagcagcaaaacacggctcctcaaattggaactgtcaacagccagggggccttacccggtatggtctggcagaaccgggacgtgtacctgcagggtcccatctgggccaagattcctcacacggacggcaacttccacccgtctccgctgatgggcggctttggcctgaaacatcctccgcctcagatcctgatcaagaacacgcctgtacctgcggatcctccgaccaccttcaaccagtcaaagctgaactctttcatcacgcaatacagcaccggacaggtcagcgtggaaattgaatgggagctgcagaaggaaaacagcaagcgctggaaccccgagatccagtacacctccaactactacaaatctacaagtgtggactttgctgttaatacagaaggcgtgtactctgaaccccgccccattggcacccgttacctcacccgtaatctgtaa

SEQ ID NO: 123 - protein, 738 aa, artificial sequence; identical to SEQ ID NO: 55
  Synthetic Construct

SEQ ID NO: 124 - DNA, 2217 bp, artificial sequence
  synthetic polynucleotide coding for Mutant5-#129
  CDS (1)..(2217)
atggctgccgatggttatcttccagattggctcgaggacaacctctctgagggcattcgcgagtggtgggcgctgaaacctggagccccgaagcccaaagccaaccagcaaaagcaggacgacggccggggtctggtgcttcctggctacaagtacctcggacccttcaacggactcgacaagggggagcccgtcaacgcggcggacgcagcggccctcgagcacgacaaggcctacgaccagcagctgcaggcgggtgacaatccgtacctgcggtataaccacgccgacgccgagtttcaggagcgtctgcaagaagatacgtcttttgggggcaacctcgggcgagcagtcttccaggccaagaagcgggttctcgaacctctcggtctggttgaggaaggcgctaagacggctcctggaaagaagagaccggtagagccatcaccccagcgttctccagactcctctacgggcatcggcaagaaaggccaacagcccgccagaaaaagactcaattttggtcagactggcgactcagagtcagttccagaccctcaacctctcggagaacctccagcagcgccctctggtgtgggacctaatacaatggctgcaggcggtggcgcaccaatggcagacaataacgaaggcgccgacggagtgggtagttcctcgggaaattggcattgcgattccacatggctgggcgacagagtcatcaccaccagcacccgaacctgggccctgcccacctacaacaaccacctctacaagcaaatctccaacgggacatcgggaggagccaccaacgacaacacctacttcggctacagcaccccctgggggtattttgactttaacagattccactgccacttttcaccacgtgactggcagcgactcatcaacaacaactggggattccggcccaagagactcagcttcaagctcttcaacatccaggtcaaggaggtcacgcagaatgaaggcaccaagaccatcgccaataacctcaccagcaccatccaggtgtttacggactcggagtaccagctgccgtacgttctcggctctgcccaccagggctgcctgcctccgttcccggcggacgtgttcatgattccccagtacggctacctaacactcaacaacggtagtcaggccgtgggacgctcctccttctactgcctggaatactttccttcgcagatgctgagaaccggcaacaacttccagtttacttacaccttcgaggacgtgcctttccacagcagctacgcccacagccagagcttggaccggctgatgaatcctctgattgaccagtacctgtattatctaaacagaacacaaacaaccagtggaactcccacgcagtctcggctactgtttagccaagctggacccacaagcatgtctcttcaagctaaaaactggctgcctggaccgtgttaccgccaacaacgcgtctcaacgacaaccgggcaaaacaacaatagcaactttgcctggactgctgggaccaaataccatctgaatggaagaaattcattggctaatcctggcatcgctatggcaacacacaaagacgacgaggagcgtttttttcccagtaacgggatcctgatttttggcaaacaaaatgctgccagagacaatgcggattacagcgatgtcatgctcaccagcgaggaagaaatcaaaaccactaaccctgtggctacagaggaatacggtatcgtggcagataacttgcagcagcaaaacacggctcctcaaattggaactgtcaacagccagggggccttacccggtatggtctggcagaaccgggacgtgtacctgcagggtcccatctgggccaagattcctcacacggacggcaacttccacccgtctccgctgatgggcggctttggcctgaaacatcctccgcctcagatcctgatcaagaacacgcctgtacctgcggatcctccgaccaccttcaaccagtcaaagctgaactctttcatcacgcaatacagcaccggacaggtcagcgtggaaattgaatgggagctgcagaaggaaaacagcaagcgctggaaccccgagatccagtacacctccaactactacaaatctacaagtgtggactttgctgttaatacagaaggcgtgtactctgaaccccgccccattggcacccgttacctcacccgtaatctgtaa

SEQ ID NO: 125 - protein, 738 aa, artificial sequence; identical to SEQ ID NO: 56
  Synthetic Construct

SEQ ID NO: 126 - DNA, 2214 bp, artificial sequence
  synthetic polynucleotide coding for Mutant5-#767
  CDS (1)..(2214)
atggctgccgatggttatcttccagattggctcgaggacaacctctctgagggcattcgcgagtggtgggcgctgaaacctggagccccgaagcccaaagccaaccagcaaaagcaggacgacggccggggtctggtgcttcctggctacaagtacctcggacccttcaacggactcgacaagggggagcccgtcaacgcggcggacgcagcggccctcgagcacgacaaggcctacgaccagcagctgcaggcgggtgacaatccgtacctgcggtataaccacgccgacgccgagtttcaggagcgtctgcaagaagatacgtcttttgggggcaacctcgggcgagcagtcttccaggccaagaagcgggttctcgaacctctcggtctggttgaggaaggcgctaagacggctcctggaaagaagagaccggtagagccatcaccccagcgttctccagactcctctacgggcatcggcaagaaaggccaacagcccgccagaaaaagactcaattttggtcagactggcgactcagagtcagttccagaccctcaacctctcggagaacctccagcagcgccctctggtgtgggacctaatacaatggctgcaggcggtggcgcaccaatggcagacaataacgaaggcgccgacggagtgggtagttcctcgggaaattggcattgcgattccacatggctgggcgacagagtcatcaccaccagcacccgaacctgggccctgcccacctacaacaaccacctctacaagcaaatctccaacgggacatcgggaggagccaccaacgacaacacctacttcggctacagcaccccctgggggtattttgactttaacagattccactgccacttttcaccacgtgactggcagcgactcatcaacaacaactggggattccggcccaagagactcagcttcaagctcttcaacatccaggtcaaggaggtcacgcagaatgaaggcaccaagaccatcgccaataacctcaccagcaccatccaggtgtttacggactcggagtaccagctgccgtacgttctcggctctgcccaccagggctgcctgcctccgttcccggcggacgtgttcatgattccccagtacggctacctaacactcaacaacggtagtcaggccgtgggacgctcctccttctactgcctggaatactttccttcgcagatgctgagaaccggcaacaacttccagtttacttacaccttcgaggacgtgcctttccacagcagctacgcccacagccagagcttggaccggctgatgaatcctctgattgaccagtacctgtattatctgaacaaaacacaatctagtggaactcttcagcagtctcggttactgtttagtcaagctggacccaccagcatgtctcttcaagctaggaactggcttcctggaccctgttaccgccaacaacgcgtctcaacgacaaccgggcaaaacaacaatagcaactttgcctggactgctgggaccaaataccatctgaatggaagaaattcattggctaatcctggcatcgctatggcaacacacaaagacgacgaggagcgtttttttcccagtaacgggatcctgatttttggcaaacaaaatgctgccagagacaatgcggattacagcgatgtcatgctcaccagcgaggaagaaatcaaaaccactaaccctgtggctacagaggaatacggtatcgtggcagataacttgcagcagcaaaacacggctcctcaaattggaactgtcaacagccagggggccttacccggtatggtctggcagaaccgggacgtgtacctgcagggtcccatctgggccaagattcctcacacggacggcaacttccacccgtctccgctgatgggcggctttggcctgaaacatcctccgcctcagatcctgatcaagaacacgcctgtacctgcggatcctccgaccaccttcaaccagtcaaagctgaactctttcatcacgcaatacagcaccggacaggtcagcgtggaaattgaatgggagctgcagaaggaaaacagcaagcgctggaaccccgagatccagtacacctccaactactacaaatctacaagtgtggactttgctgttaatacagaaggcgtgtactctgaaccccgccccattggcacccgttacctcacccgtaatctgtaa

SEQ ID NO: 127 - protein, 737 aa, artificial sequence; identical to SEQ ID NO: 57
  Synthetic Construct

SEQ ID NO: 128 - DNA, 2214 bp, artificial sequence
  synthetic polynucleotide coding for Mutant4-AAV13
  CDS (1)..(2214)
atggctgccgatggttatcttccagattggctcgaggacaacctctctgagggcattcgcgagtggtgggcgctgaaacctggagccccgaagcccaaagccaaccagcaaaagcaggacgacggccggggtctggtgcttcctggctacaagtacctcggacccttcaacggactcgacaagggggagcccgtcaacgcggcggacgcagcggccctcgagcacgacaaggcctacgaccagcagctgcaggcgggtgacaatccgtacctgcggtataaccacgccgacgccgagtttcaggagcgtctgcaagaagatacgtcttttgggggcaacctcgggcgagcagtcttccaggccaagaagcgggttctcgaacctctcggtctggttgaggaaggcgctaagacggctcctggaaagaagagaccggtagagccatcaccccagcgttctccagactcctctacgggcatcggcaagaaaggccaacagcccgccagaaaaagactcaattttggtcagactggcgactcagagtcagttccagaccctcaacctctcggagaacctccagcagcgccctctggtgtgggacctaatacaatggctgcaggcggtggcgcaccaatggcagacaataacgaaggcgccgacggagtgggtagttcctcgggaaattggcattgcgattccacatggctgggcgacagagtcatcaccaccagcacccgaacctgggccctgcccacctacaacaaccacctctacaagcaaatctccaacgggacatcgggaggagccaccaacgacaacacctacttcggctacagcaccccctgggggtattttgactttaacagattccactgccacttttcaccacgtgactggcagcgactcatcaacaacaactggggattccggcccaagagactcagcttcaagctcttcaacatccaggtcaaggaggtcacgcagaatgaaggcaccaagaccatcgccaataacctcaccagcaccatccaggtgtttacggactcggagtaccagctgccgtacgttctcggctctgcccaccagggctgcctgcctccgttcccggcggacgtgttcatgattccccagtacggctacctaacactcaacaacggtagtcaggccgtgggacgctcctccttctactgcctggaatactttccttcgcagatgctgagaaccggcaacaacttccagtttacttacaccttcgaggacgtgcctttccacagcagctacgcccacagccagagcttggaccggctgatgaatcctctgattgaccagtacctgtactatctgaacaggacacaaacagccagtggaactcagcagtctcggctactgtttagccaagctggacccaccagtatgtctcttcaagctaaaaactggctgcctggaccttgctacagacagcagcgtctgtcaaagcaggcaaacgacaacaacaacagcaactttccctggactggtgccaccaaatatcatctgaatggccgggactcattggtgaacccgggccctgctatggccagtcacaaggatgacgaggagcgtttttttcccagtaacgggatcctgatttttggcaaacaaaatgctgccagagacaatgcggattacagcgatgtcatgctcaccagcgaggaagaaatcaaaaccactaaccctgtggctacagaggaatacggtatcgtggcagataacttgcagcagcaaaacacggctcctcaaattggaactgtcaacagccagggggccttacccggtatggtctggcagaaccgggacgtgtacctgcagggtcccatctgggccaagattcctcacacggacggcaacttccacccgtctccgctgatgggcggctttggcctgaaacatcctccgcctcagatcctgatcaagaacacgcctgtacctgcggatcctccgaccaccttcaaccagtcaaagctgaactctttcatcacgcaatacagcaccggacaggtcagcgtggaaattgaatgggagctgcagaaggaaaacagcaagcgctggaaccccgagatccagtacacctccaactactacaaatctacaagtgtggactttgctgttaatacagaaggcgtgtactctgaaccccgccccattggcacccgttacctcacccgtaatctgtaa

SEQ ID NO: 129 - protein, 737 aa, artificial sequence; identical to SEQ ID NO: 58
  Synthetic Construct

SEQ ID NO: 130 - DNA, 2217 bp, artificial sequence
  synthetic polynucleotide coding for Mutant4-AAV2
  CDS (1)..(2217)
atggctgccgatggttatcttccagattggctcgaggacaacctctctgagggcattcgcgagtggtgggcgctgaaacctggagccccgaagcccaaagccaaccagcaaaagcaggacgacggccggggtctggtgcttcctggctacaagtacctcggacccttcaacggactcgacaagggggagcccgtcaacgcggcggacgcagcggccctcgagcacgacaaggcctacgaccagcagctgcaggcgggtgacaatccgtacctgcggtataaccacgccgacgccgagtttcaggagcgtctgcaagaagatacgtcttttgggggcaacctcgggcgagcagtcttccaggccaagaagcgggttctcgaacctctcggtctggttgaggaaggcgctaagacggctcctggaaagaagagaccggtagagccatcaccccagcgttctccagactcctctacgggcatcggcaagaaaggccaacagcccgccagaaaaagactcaattttggtcagactggcgactcagagtcagttccagaccctcaacctctcggagaacctccagcagcgccctctggtgtgggacctaatacaatggctgcaggcggtggcgcaccaatggcagacaataacgaaggcgccgacggagtgggtagttcctcgggaaattggcattgcgattccacatggctgggcgacagagtcatcaccaccagcacccgaacctgggccctgcccacctacaacaaccacctctacaagcaaatctccaacgggacatcgggaggagccaccaacgacaacacctacttcggctacagcaccccctgggggtattttgactttaacagattccactgccacttttcaccacgtgactggcagcgactcatcaacaacaactggggattccggcccaagagactcagcttcaagctcttcaacatccaggtcaaggaggtcacgcagaatgaaggcaccaagaccatcgccaataacctcaccagcaccatccaggtgtttacggactcggagtaccagctgccgtacgttctcggctctgcccaccagggctgcctgcctccgttcccggcggacgtgttcatgattccccagtacggctacctaacactcaacaacggtagtcaggccgtgggacgctcctccttctactgcctggaatactttccttcgcagatgctgagaaccggcaacaacttccagtttacttacaccttcgaggacgtgcctttccacagcagctacgcccacagccagagcttggaccggctgatgaatcctctgattgaccagtacctgtattacttgagcagaacaaacactccaagtggaaccaccacgcagtcaaggcttcagttttctcaggccggagcgagtgacattcgggaccagtctaggaactggcttcctggaccctgttaccgccagcagcgagtatcaaagacatctgcggataacaacaacagtgaatactcgtggactggagctaccaagtaccacctcaatggcagagactctctggtgaatccgggcccggccatggcaagccacaaggacgacgaggagcgtttttttcccagtaacgggatcctgatttttggcaaacaaaatgctgccagagacaatgcggattacagcgatgtcatgctcaccagcgaggaagaaatcaaaaccactaaccctgtggctacagaggaatacggtatcgtggcagataacttgcagcagcaaaacacggctcctcaaattggaactgtcaacagccagggggccttacccggtatggtctggcagaaccgggacgtgtacctgcagggtcccatctgggccaagattcctcacacggacggcaacttccacccgtctccgctgatgggcggctttggcctgaaacatcctccgcctcagatcctgatcaagaacacgcctgtacctgcggatcctccgaccaccttcaaccagtcaaagctgaactctttcatcacgcaatacagcaccggacaggtcagcgtggaaattgaatgggagctgcagaaggaaaacagcaagcgctggaaccccgagatccagtacacctccaactactacaaatctacaagtgtggactttgctgttaatacagaaggcgtgtactctgaaccccgccccattggcacccgttacctcacccgtaatctgtaa

SEQ ID NO: 131 - protein, 738 aa, artificial sequence; identical to SEQ ID NO: 59
  Synthetic Construct

SEQ ID NO: 132 - DNA, 2217 bp, artificial sequence
  synthetic polynucloetide coding for Mutant4-1704
  CDS (1)..(2217)
atggctgccgatggttatcttccagattggctcgaggacaacctctctgagggcattcgcgagtggtgggcgctgaaacctggagccccgaagcccaaagccaaccagcaaaagcaggacgacggccggggtctggtgcttcctggctacaagtacctcggacccttcaacggactcgacaagggggagcccgtcaacgcggcggacgcagcggccctcgagcacgacaaggcctacgaccagcagctgcaggcgggtgacaatccgtacctgcggtataaccacgccgacgccgagtttcaggagcgtctgcaagaagatacgtcttttgggggcaacctcgggcgagcagtcttccaggccaagaagcgggttctcgaacctctcggtctggttgaggaaggcgctaagacggctcctggaaagaagagaccggtagagccatcaccccagcgttctccagactcctctacgggcatcggcaagaaaggccaacagcccgccagaaaaagactcaattttggtcagactggcgactcagagtcagttccagaccctcaacctctcggagaacctccagcagcgccctctggtgtgggacctaatacaatggctgcaggcggtggcgcaccaatggcagacaataacgaaggcgccgacggagtgggtagttcctcgggaaattggcattgcgattccacatggctgggcgacagagtcatcaccaccagcacccgaacctgggccctgcccacctacaacaaccacctctacaagcaaatctccaacgggacatcgggaggagccaccaacgacaacacctacttcggctacagcaccccctgggggtattttgactttaacagattccactgccacttttcaccacgtgactggcagcgactcatcaacaacaactggggattccggcccaagagactcagcttcaagctcttcaacatccaggtcaaggaggtcacgcagaatgaaggcaccaagaccatcgccaataacctcaccagcaccatccaggtgtttacggactcggagtaccagctgccgtacgttctcggctctgcccaccagggctgcctgcctccgttcccggcggacgtgttcatgattccccagtacggctacctaacactcaacaacggtagtcaggccgtgggacgctcctccttctactgcctggaatactttccttcgcagatgctgagaaccggcaacaacttccagtttacttacaccttcgaggacgtgcctttccacagcagctacgcccacagccagagcttggaccggctgatgaatcctctgattgaccagtacctgtattatctgaacaagacacaaacaaatagtggaactcttcagcagtctcggctactgtttagtcaagctggacccaccagcatgtctcttcaagctaaaaactggctgcctggaccttgctacagacagcagcgtctgtcaaagcaggcaaacgacaacaacaacagcaattttccctggactgcggctacaaagtatcatctaaatggccgggactctctggtgaatccaggaccagctatggccagtcacaaggatgacgaggagcgtttttttcccagtaacgggatcctgatttttggcaaacaaaatgctgccagagacaatgcggattacagcgatgtcatgctcaccagcgaggaagaaatcaaaaccactaaccctgtggctacagaggaatacggtatcgtggcagataacttgcagcagcaaaacacggctcctcaaattggaactgtcaacagccagggggccttacccggtatggtctggcagaaccgggacgtgtacctgcagggtcccatctgggccaagattcctcacacggacggcaacttccacccgtctccgctgatgggcggctttggcctgaaacatcctccgcctcagatcctgatcaagaacacgcctgtacctgcggatcctccgaccaccttcaaccagtcaaagctgaactctttcatcacgcaatacagcaccggacaggtcagcgtggaaattgaatgggagctgcagaaggaaaacagcaagcgctggaaccccgagatccagtacacctccaactactacaaatctacaagtgtggactttgctgttaatacagaaggcgtgtactctgaaccccgccccattggcacccgttacctcacccgtaatctgtaa

SEQ ID NO: 133 - protein, 738 aa, artificial sequence; identical to SEQ ID NO: 60
  Synthetic Construct

SEQ ID NO: 134 - DNA, 2217 bp, artificial sequence
  synthetic polynucleotide coding for Mutant4-3086
  CDS (1)..(2217)
atggctgccgatggttatcttccagattggctcgaggacaacctctctgagggcattcgcgagtggtgggcgctgaaacctggagccccgaagcccaaagccaaccagcaaaagcaggacgacggccggggtctggtgcttcctggctacaagtacctcggacccttcaacggactcgacaagggggagcccgtcaacgcggcggacgcagcggccctcgagcacgacaaggcctacgaccagcagctgcaggcgggtgacaatccgtacctgcggtataaccacgccgacgccgagtttcaggagcgtctgcaagaagatacgtcttttgggggcaacctcgggcgagcagtcttccaggccaagaagcgggttctcgaacctctcggtctggttgaggaaggcgctaagacggctcctggaaagaagagaccggtagagccatcaccccagcgttctccagactcctctacgggcatcggcaagaaaggccaacagcccgccagaaaaagactcaattttggtcagactggcgactcagagtcagttccagaccctcaacctctcggagaacctccagcagcgccctctggtgtgggacctaatacaatggctgcaggcggtggcgcaccaatggcagacaataacgaaggcgccgacggagtgggtagttcctcgggaaattggcattgcgattccacatggctgggcgacagagtcatcaccaccagcacccgaacctgggccctgcccacctacaacaaccacctctacaagcaaatctccaacgggacatcgggaggagccaccaacgacaacacctacttcggctacagcaccccctgggggtattttgactttaacagattccactgccacttttcaccacgtgactggcagcgactcatcaacaacaactggggattccggcccaagagactcagcttcaagctcttcaacatccaggtcaaggaggtcacgcagaatgaaggcaccaagaccatcgccaataacctcaccagcaccatccaggtgtttacggactcggagtaccagctgccgtacgttctcggctctgcccaccagggctgcctgcctccgttcccggcggacgtgttcatgattccccagtacggctacctaacactcaacaacggtagtcaggccgtgggacgctcctccttctactgcctggaatactttccttcgcagatgctgagaaccggcaacaacttccagtttacttacaccttcgaggacgtgcctttccacagcagctacgcccacagccagagcttggaccggctgatgaatcctctgattgaccagtacctgtattatctgaacaagacacaatcaaatagtggaactcttcagcagtctcggctactgtttagccaagctggacccaccaacatgtctcttcaagctaaaaactggctgcctggaccttgctacagacagcagcgtttatcaaagcaggcaaacgacaacaataacagcaactttccctggactgcagctacaaagtatcatctaaatggccgggactcgttggttaatccaggaccagctatggccagtcataaagacgacgaggagcgtttttttcccagtaacgggatcctgatttttggcaaacaaaatgctgccagagacaatgcggattacagcgatgtcatgctcaccagcgaggaagaaatcaaaaccactaaccctgtggctacagaggaatacggtatcgtggcagataacttgcagcagcaaaacacggctcctcaaattggaactgtcaacagccagggggccttacccggtatggtctggcagaaccgggacgtgtacctgcagggtcccatctgggccaagattcctcacacggacggcaacttccacccgtctccgctgatgggcggctttggcctgaaacatcctccgcctcagatcctgatcaagaacacgcctgtacctgcggatcctccgaccaccttcaaccagtcaaagctgaactctttcatcacgcaatacagcaccggacaggtcagcgtggaaattgaatgggagctgcagaaggaaaacagcaagcgctggaaccccgagatccagtacacctccaactactacaaatctacaagtgtggactttgctgttaatacagaaggcgtgtactctgaaccccgccccattggcacccgttacctcacccgtaatctgtaa

SEQ ID NO: 135 - protein, 738 aa, artificial sequence; identical to SEQ ID NO: 61
  Synthetic Construct

SEQ ID NO: 136 - DNA, 2214 bp, artificial sequence
  synthetic polynucleotide coding for Mutant4-1024
  CDS (1)..(2214)
atggctgccgatggttatcttccagattggctcgaggacaacctctctgagggcattcgcgagtggtgggcgctgaaacctggagccccgaagcccaaagccaaccagcaaaagcaggacgacggccggggtctggtgcttcctggctacaagtacctcggacccttcaacggactcgacaagggggagcccgtcaacgcggcggacgcagcggccctcgagcacgacaaggcctacgaccagcagctgcaggcgggtgacaatccgtacctgcggtataaccacgccgacgccgagtttcaggagcgtctgcaagaagatacgtcttttgggggcaacctcgggcgagcagtcttccaggccaagaagcgggttctcgaacctctcggtctggttgaggaaggcgctaagacggctcctggaaagaagagaccggtagagccatcaccccagcgttctccagactcctctacgggcatcggcaagaaaggccaacagcccgccagaaaaagactcaattttggtcagactggcgactcagagtcagttccagaccctcaacctctcggagaacctccagcagcgccctctggtgtgggacctaatacaatggctgcaggcggtggcgcaccaatggcagacaataacgaaggcgccgacggagtgggtagttcctcgggaaattggcattgcgattccacatggctgggcgacagagtcatcaccaccagcacccgaacctgggccctgcccacctacaacaaccacctctacaagcaaatctccaacgggacatcgggaggagccaccaacgacaacacctacttcggctacagcaccccctgggggtattttgactttaacagattccactgccacttttcaccacgtgactggcagcgactcatcaacaacaactggggattccggcccaagagactcagcttcaagctcttcaacatccaggtcaaggaggtcacgcagaatgaaggcaccaagaccatcgccaataacctcaccagcaccatccaggtgtttacggactcggagtaccagctgccgtacgttctcggctctgcccaccagggctgcctgcctccgttcccggcggacgtgttcatgattccccagtacggctacctaacactcaacaacggtagtcaggccgtgggacgctcctccttctactgcctggaatactttccttcgcagatgctgagaaccggcaacaacttccagtttacttacaccttcgaggacgtgcctttccacagcagctacgcccacagccagagcttggaccggctgatgaatcctctgattgaccagtacctgtattatctaaacaggacacaaacagccagtggaactcagcagtctcggctactgtttagccaagctggacccaccagcatgtctcttcaagctaaaaactggctgcctggaccttgctacagacaacagcgtttgtcaaagcaggcaaacgacaacaacaatagcaactttccctggactgcggctacaaagtaccacctcaatggcagagactctctggtgaatccgggccctgctatggccagtcacaaagacgacgaggagcgtttttttcccagtaacgggatcctgatttttggcaaacaaaatgctgccagagacaatgcggattacagcgatgtcatgctcaccagcgaggaagaaatcaaaaccactaaccctgtggctacagaggaatacggtatcgtggcagataacttgcagcagcaaaacacggctcctcaaattggaactgtcaacagccagggggccttacccggtatggtctggcagaaccgggacgtgtacctgcagggtcccatctgggccaagattcctcacacggacggcaacttccacccgtctccgctgatgggcggctttggcctgaaacatcctccgcctcagatcctgatcaagaacacgcctgtacctgcggatcctccgaccaccttcaaccagtcaaagctgaactctttcatcacgcaatacagcaccggacaggtcagcgtggaaattgaatgggagctgcagaaggaaaacagcaagcgctggaaccccgagatccagtacacctccaactactacaaatctacaagtgtggactttgctgttaatacagaaggcgtgtactctgaaccccgccccattggcacccgttacctcacccgtaatctgtaa

SEQ ID NO: 137 - protein, 737 aa, artificial sequence; identical to SEQ ID NO: 62
  Synthetic Construct

SEQ ID NO: 138 - DNA, 2214 bp, artificial sequence
  synthetic polynucleotide coding for Mutant4-508
  CDS (1)..(2214)
atggctgccgatggttatcttccagattggctcgaggacaacctctctgagggcattcgcgagtggtgggcgctgaaacctggagccccgaagcccaaagccaaccagcaaaagcaggacgacggccggggtctggtgcttcctggctacaagtacctcggacccttcaacggactcgacaagggggagcccgtcaacgcggcggacgcagcggccctcgagcacgacaaggcctacgaccagcagctgcaggcgggtgacaatccgtacctgcggtataaccacgccgacgccgagtttcaggagcgtctgcaagaagatacgtcttttgggggcaacctcgggcgagcagtcttccaggccaagaagcgggttctcgaacctctcggtctggttgaggaaggcgctaagacggctcctggaaagaagagaccggtagagccatcaccccagcgttctccagactcctctacgggcatcggcaagaaaggccaacagcccgccagaaaaagactcaattttggtcagactggcgactcagagtcagttccagaccctcaacctctcggagaacctccagcagcgccctctggtgtgggacctaatacaatggctgcaggcggtggcgcaccaatggcagacaataacgaaggcgccgacggagtgggtagttcctcgggaaattggcattgcgattccacatggctgggcgacagagtcatcaccaccagcacccgaacctgggccctgcccacctacaacaaccacctctacaagcaaatctccaacgggacatcgggaggagccaccaacgacaacacctacttcggctacagcaccccctgggggtattttgactttaacagattccactgccacttttcaccacgtgactggcagcgactcatcaacaacaactggggattccggcccaagagactcagcttcaagctcttcaacatccaggtcaaggaggtcacgcagaatgaaggcaccaagaccatcgccaataacctcaccagcaccatccaggtgtttacggactcggagtaccagctgccgtacgttctcggctctgcccaccagggctgcctgcctccgttcccggcggacgtgttcatgattccccagtacggctacctaacactcaacaacggtagtcaggccgtgggacgctcctccttctactgcctggaatactttccttcgcagatgctgagaaccggcaacaacttccagtttacttacaccttcgaggacgtgcctttccacagcagctacgcccacagccagagcttggaccggctgatgaatcctctgattgaccagtacctgtattatctaaacaggacacaaacagccagtggaactcagcagtctcggctactgtttagccaagctggacccaccagcatgtctcttcaagctaaaaactggctgcctggaccttgctacagacagcagcgtctgtcaaagcaggcaaacgacaacaacaacagcaactactcgtggactggagctaccaagtaccacctcaatggtagagactctttggtgaacccgggccctgctatggccagccacaaagacgacgaggagcgtttttttcccagtaacgggatcctgatttttggcaaacaaaatgctgccagagacaatgcggattacagcgatgtcatgctcaccagcgaggaagaaatcaaaaccactaaccctgtggctacagaggaatacggtatcgtggcagataacttgcagcagcaaaacacggctcctcaaattggaactgtcaacagccagggggccttacccggtatggtctggcagaaccgggacgtgtacctgcagggtcccatctgggccaagattcctcacacggacggcaacttccacccgtctccgctgatgggcggctttggcctgaaacatcctccgcctcagatcctgatcaagaacacgcctgtacctgcggatcctccgaccaccttcaaccagtcaaagctgaactctttcatcacgcaatacagcaccggacaggtcagcgtggaaattgaatgggagctgcagaaggaaaacagcaagcgctggaaccccgagatccagtacacctccaactactacaaatctacaagtgtggactttgctgttaatacagaaggcgtgtactctgaaccccgccccattggcacccgttacctcacccgtaatctgtaa

SEQ ID NO: 139 - protein, 737 aa, artificial sequence; identical to SEQ ID NO: 63
  Synthetic Construct

SEQ ID NO: 140 - DNA, 2217 bp, artificial sequence
  synthetic polynucleotide coding for Mutant4-3142
  CDS (1)..(2217)
atggctgccgatggttatcttccagattggctcgaggacaacctctctgagggcattcgcgagtggtgggcgctgaaacctggagccccgaagcccaaagccaaccagcaaaagcaggacgacggccggggtctggtgcttcctggctacaagtacctcggacccttcaacggactcgacaagggggagcccgtcaacgcggcggacgcagcggccctcgagcacgacaaggcctacgaccagcagctgcaggcgggtgacaatccgtacctgcggtataaccacgccgacgccgagtttcaggagcgtctgcaagaagatacgtcttttgggggcaacctcgggcgagcagtcttccaggccaagaagcgggttctcgaacctctcggtctggttgaggaaggcgctaagacggctcctggaaagaagagaccggtagagccatcaccccagcgttctccagactcctctacgggcatcggcaagaaaggccaacagcccgccagaaaaagactcaattttggtcagactggcgactcagagtcagttccagaccctcaacctctcggagaacctccagcagcgccctctggtgtgggacctaatacaatggctgcaggcggtggcgcaccaatggcagacaataacgaaggcgccgacggagtgggtagttcctcgggaaattggcattgcgattccacatggctgggcgacagagtcatcaccaccagcacccgaacctgggccctgcccacctacaacaaccacctctacaagcaaatctccaacgggacatcgggaggagccaccaacgacaacacctacttcggctacagcaccccctgggggtattttgactttaacagattccactgccacttttcaccacgtgactggcagcgactcatcaacaacaactggggattccggcccaagagactcagcttcaagctcttcaacatccaggtcaaggaggtcacgcagaatgaaggcaccaagaccatcgccaataacctcaccagcaccatccaggtgtttacggactcggagtaccagctgccgtacgttctcggctctgcccaccagggctgcctgcctccgttcccggcggacgtgttcatgattccccagtacggctacctaacactcaacaacggtagtcaggccgtgggacgctcctccttctactgcctggaatactttccttcgcagatgctgagaaccggcaacaacttccagtttacttacaccttcgaggacgtgcctttccacagcagctacgcccacagccagagcttggaccggctgatgaatcctctgattgaccagtacctgtattatctgaacaagacacaatcaaatagtggaactgttcagcagtctcggctactgtttagccaagctggacccaccagcatgtctcttcaagctaaaaactggctgcctggaccttgctacagacagcagcgtctgtcaaagcaggcaagcgacaacaacaacagcaactttccctggactgcggctacaaagtatcatctaaatggccgggactcgttggttaatccaggaccagctatggccagtcacaaggatgacgaggagcgtttttttcccagtaacgggatcctgatttttggcaaacaaaatgctgccagagacaatgcggattacagcgatgtcatgctcaccagcgaggaagaaatcaaaaccactaaccctgtggctacagaggaatacggtatcgtggcagataacttgcagcagcaaaacacggctcctcaaattggaactgtcaacagccagggggccttacccggtatggtctggcagaaccgggacgtgtacctgcagggtcccatctgggccaagattcctcacacggacggcaacttccacccgtctccgctgatgggcggctttggcctgaaacatcctccgcctcagatcctgatcaagaacacgcctgtacctgcggatcctccgaccaccttcaaccagtcaaagctgaactctttcatcacgcaatacagcaccggacaggtcagcgtggaaattgaatgggagctgcagaaggaaaacagcaagcgctggaaccccgagatccagtacacctccaactactacaaatctacaagtgtggactttgctgttaatacagaaggcgtgtactctgaaccccgccccattggcacccgttacctcacccgtaatctgtaa

SEQ ID NO: 141 - protein, 738 aa, artificial sequence
  Synthetic Construct
MAADGYLPDWLEDNLSEGIREWWALKPGAPKPKANQQKQDDGRGLVLPGYKYLGPFNGLDKGEPVNAADAAALEHDKAYDQQLQAGDNPYLRYNHADAEFQERLQEDTSFGGNLGRAVFQAKKRVLEPLGLVEEGAKTAPGKKRPVEPSPQRSPDSSTGIGKKGQQPARKRLNFGQTGDSESVPDPQPLGEPPAAPSGVGPNTMAAGGGAPMADNNEGADGVGSSSGNWHCDSTWLGDRVITTSTRTWALPTYNNHLYKQISNGTSGGATNDNTYFGYSTPWGYFDFNRFHCHFSPRDWQRLINNNWGFRPKRLSFKLFNIQVKEVTQNEGTKTIANNLTSTIQVFTDSEYQLPYVLGSAHQGCLPPFPADVFMIPQYGYLTLNNGSQAVGRSSFYCLEYFPSQMLRTGNNFQFTYTFEDVPFHSSYAHSQSLDRLMNPLIDQYLYYLNKTQSNSGTVQQSRLLFSQAGPTSMSLQAKNWLPGPCYRQQRLSKQASDNNNSNFPWTAATKYHLNGRDSLVNPGPAMASHKDDEERFFPSNGILIFGKQNAARDNADYSDVMLTSEEEIKTTNPVATEEYGIVADNLQQQNTAPQIGTVNSQGALPGMVWQNRDVYLQGPIWAKIPHTDGNFHPSPLMGGFGLKHPPPQILIKNTPVPADPPTTFNQSKLNSFITQYSTGQVSVEIEWELQKENSKRWNPEIQYTSNYYKSTSVDFAVNTEGVYSEPRPIGTRYLTRNL

SEQ ID NO: 142 - DNA, 2217 bp, artificial sequence
  synthetic polynucleotide coding for Mutant4-2320
  CDS (1)..(2217)
atggctgccgatggttatcttccagattggctcgaggacaacctctctgagggcattcgcgagtggtgggcgctgaaacctggagccccgaagcccaaagccaaccagcaaaagcaggacgacggccggggtctggtgcttcctggctacaagtacctcggacccttcaacggactcgacaagggggagcccgtcaacgcggcggacgcagcggccctcgagcacgacaaggcctacgaccagcagctgcaggcgggtgacaatccgtacctgcggtataaccacgccgacgccgagtttcaggagcgtctgcaagaagatacgtcttttgggggcaacctcgggcgagcagtcttccaggccaagaagcgggttctcgaacctctcggtctggttgaggaaggcgctaagacggctcctggaaagaagagaccggtagagccatcaccccagcgttctccagactcctctacgggcatcggcaagaaaggccaacagcccgccagaaaaagactcaattttggtcagactggcgactcagagtcagttccagaccctcaacctctcggagaacctccagcagcgccctctggtgtgggacctaatacaatggctgcaggcggtggcgcaccaatggcagacaataacgaaggcgccgacggagtgggtagttcctcgggaaattggcattgcgattccacatggctgggcgacagagtcatcaccaccagcacccgaacctgggccctgcccacctacaacaaccacctctacaagcaaatctccaacgggacatcgggaggagccaccaacgacaacacctacttcggctacagcaccccctgggggtattttgactttaacagattccactgccacttttcaccacgtgactggcagcgactcatcaacaacaactggggattccggcccaagagactcagcttcaagctcttcaacatccaggtcaaggaggtcacgcagaatgaaggcaccaagaccatcgccaataacctcaccagcaccatccaggtgtttacggactcggagtaccagctgccgtacgttctcggctctgcccaccagggctgcctgcctccgttcccggcggacgtgttcatgattccccagtacggctacctaacactcaacaacggtagtcaggccgtgggacgctcctccttctactgcctggaatactttccttcgcagatgctgagaaccggcaacaacttccagtttacttacaccttcgaggacgtgcctttccacagcagctacgcccacagccagagcttggaccggctgatgaatcctctgattgaccagtacctgtattatctgaacaagacacaatcaaatagtggaactcttcagcagtctcggctactgtttagtcaagctggacccaccagcatgtctcttcaagctaaaaactggctgcctggaccttgctacagacagcagcgtctgtcaaagcaggcaacggataacaacaacagtgaatttccctggactgcggctacaaagtatcatctcaatggccgggactcgttggttaatccaggaccagctatggccagccacaaagacgacgaggagcgtttttttcccagtaacgggatcctgatttttggcaaacaaaatgctgccagagacaatgcggattacagcgatgtcatgctcaccagcgaggaagaaatcaaaaccactaaccctgtggctacagaggaatacggtatcgtggcagataacttgcagcagcaaaacacggctcctcaaattggaactgtcaacagccagggggccttacccggtatggtctggcagaaccgggacgtgtacctgcagggtcccatctgggccaagattcctcacacggacggcaacttccacccgtctccgctgatgggcggctttggcctgaaacatcctccgcctcagatcctgatcaagaacacgcctgtacctgcggatcctccgaccaccttcaaccagtcaaagctgaactctttcatcacgcaatacagcaccggacaggtcagcgtggaaattgaatgggagctgcagaaggaaaacagcaagcgctggaaccccgagatccagtacacctccaactactacaaatctacaagtgtggactttgctgttaatacagaaggcgtgtactctgaaccccgccccattggcacccgttacctcacccgtaatctgtaa

SEQ ID NO: 143 - protein, 738 aa, artificial sequence; identical to SEQ ID NO: 65
  Synthetic Construct

SEQ ID NO: 144 - DNA, 2217 bp, artificial sequence
  synthetic polynucleotide coding for Mutant4-1010
  CDS (1)..(2217)
atggctgccgatggttatcttccagattggctcgaggacaacctctctgagggcattcgcgagtggtgggcgctgaaacctggagccccgaagcccaaagccaaccagcaaaagcaggacgacggccggggtctggtgcttcctggctacaagtacctcggacccttcaacggactcgacaagggggagcccgtcaacgcggcggacgcagcggccctcgagcacgacaaggcctacgaccagcagctgcaggcgggtgacaatccgtacctgcggtataaccacgccgacgccgagtttcaggagcgtctgcaagaagatacgtcttttgggggcaacctcgggcgagcagtcttccaggccaagaagcgggttctcgaacctctcggtctggttgaggaaggcgctaagacggctcctggaaagaagagaccggtagagccatcaccccagcgttctccagactcctctacgggcatcggcaagaaaggccaacagcccgccagaaaaagactcaattttggtcagactggcgactcagagtcagttccagaccctcaacctctcggagaacctccagcagcgccctctggtgtgggacctaatacaatggctgcaggcggtggcgcaccaatggcagacaataacgaaggcgccgacggagtgggtagttcctcgggaaattggcattgcgattccacatggctgggcgacagagtcatcaccaccagcacccgaacctgggccctgcccacctacaacaaccacctctacaagcaaatctccaacgggacatcgggaggagccaccaacgacaacacctacttcggctacagcaccccctgggggtattttgactttaacagattccactgccacttttcaccacgtgactggcagcgactcatcaacaacaactggggattccggcccaagagactcagcttcaagctcttcaacatccaggtcaaggaggtcacgcagaatgaaggcaccaagaccatcgccaataacctcaccagcaccatccaggtgtttacggactcggagtaccagctgccgtacgttctcggctctgcccaccagggctgcctgcctccgttcccggcggacgtgttcatgattccccagtacggctacctaacactcaacaacggtagtcaggccgtgggacgctcctccttctactgcctggaatactttccttcgcagatgctgagaaccggcaacaacttccagtttacttacaccttcgaggacgtgcctttccacagcagctacgcccacagccagagcttggaccggctgatgaatcctctgattgaccagtacctgtattatctgaacaaaacacaatcaaatagtggaactcttcagcagtctcggctactgtttagtcaagctggacccaccagcatgtctcttcaagctaaaaactggctgcctggaccctgttaccgccagcagcgagtatcaaagacatctgcggataacaacaacagtgaatactcgtggactggagctaccaagtaccacctcaatggcagagactctctggtgaatccgggcccggccatggcaagccacaaggacgacgaggagcgtttttttcccagtaacgggatcctgatttttggcaaacaaaatgctgccagagacaatgcggattacagcgatgtcatgctcaccagcgaggaagaaatcaaaaccactaaccctgtggctacagaggaatacggtatcgtggcagataacttgcagcagcaaaacacggctcctcaaattggaactgtcaacagccagggggccttacccggtatggtctggcagaaccgggacgtgtacctgcagggtcccatctgggccaagattcctcacacggacggcaacttccacccgtctccgctgatgggcggctttggcctgaaacatcctccgcctcagatcctgatcaagaacacgcctgtacctgcggatcctccgaccaccttcaaccagtcaaagctgaactctttcatcacgcaatacagcaccggacaggtcagcgtggaaattgaatgggagctgcagaaggaaaacagcaagcgctggaaccccgagatccagtacacctccaactactacaaatctacaagtgtggactttgctgttaatacagaaggcgtgtactctgaaccccgccccattggcacccgttacctcacccgtaatctgtaa

SEQ ID NO: 145 - protein, 738 aa, artificial sequence; identical to SEQ ID NO: 66
  Synthetic Construct

SEQ ID NO: 146 - DNA, 2217 bp, artificial sequence
  synthetic polynucleotide coding for Mutant4-M258
  CDS (1)..(2217)
atggctgccgatggttatcttccagattggctcgaggacaacctctctgagggcattcgcgagtggtgggcgctgaaacctggagccccgaagcccaaagccaaccagcaaaagcaggacgacggccggggtctggtgcttcctggctacaagtacctcggacccttcaacggactcgacaagggggagcccgtcaacgcggcggacgcagcggccctcgagcacgacaaggcctacgaccagcagctgcaggcgggtgacaatccgtacctgcggtataaccacgccgacgccgagtttcaggagcgtctgcaagaagatacgtcttttgggggcaacctcgggcgagcagtcttccaggccaagaagcgggttctcgaacctctcggtctggttgaggaaggcgctaagacggctcctggaaagaagagaccggtagagccatcaccccagcgttctccagactcctctacgggcatcggcaagaaaggccaacagcccgccagaaaaagactcaattttggtcagactggcgactcagagtcagttccagaccctcaacctctcggagaacctccagcagcgccctctggtgtgggacctaatacaatggctgcaggcggtggcgcaccaatggcagacaataacgaaggcgccgacggagtgggtagttcctcgggaaattggcattgcgattccacatggctgggcgacagagtcatcaccaccagcacccgaacctgggccctgcccacctacaacaaccacctctacaagcaaatctccaacgggacatcgggaggagccaccaacgacaacacctacttcggctacagcaccccctgggggtattttgactttaacagattccactgccacttttcaccacgtgactggcagcgactcatcaacaacaactggggattccggcccaagagactcagcttcaagctcttcaacatccaggtcaaggaggtcacgcagaatgaaggcaccaagaccatcgccaataacctcaccagcaccatccaggtgtttacggactcggagtaccagctgccgtacgttctcggctctgcccaccagggctgcctgcctccgttcccggcggacgtgttcatgattccccagtacggctacctaacactcaacaacggtagtcaggccgtgggacgctcctccttctactgcctggaatactttccttcgcagatgctgagaaccggcaacaacttccagtttacttacaccttcgaggacgtgcctttccacagcagctacgcccacagccagagcttggaccggctgatgaatcctctgattgaccagtacctgtattatctgaacaagacacaatcagccagtggaactgttcagcagtctcggctactgtttagccaagctggacccaccagcatgtctcttcaagctaaaaactggctgcctggaccttgctacagacagcagcgtctgtcaaagcaggcaaacgaaaacaacaacagcaactttccctggactgcggctacaaagtatcatctcaatggccgggactcgttggttaatccaggaccagctatggccagtcacaaggatgacgaggagcgtttttttcccagtaacgggatcctgatttttggcaaacaaaatgctgccagagacaatgcggattacagcgatgtcatgctcaccagcgaggaagaaatcaaaaccactaaccctgtggctacagaggaatacggtatcgtggcagataacttgcagcagcaaaacacggctcctcaaattggaactgtcaacagccagggggccttacccggtatggtctggcagaaccgggacgtgtacctgcagggtcccatctgggccaagattcctcacacggacggcaacttccacccgtctccgctgatgggcggctttggcctgaaacatcctccgcctcagatcctgatcaagaacacgcctgtacctgcggatcctccgaccaccttcaaccagtcaaagctgaactctttcatcacgcaatacagcaccggacaggtcagcgtggaaattgaatgggagctgcagaaggaaaacagcaagcgctggaaccccgagatccagtacacctccaactactacaaatctacaagtgtggactttgctgttaatacagaaggcgtgtactctgaaccccgccccattggcacccgttacctcacccgtaatctgtaa

SEQ ID NO: 147 - protein, 738 aa, artificial sequence; identical to SEQ ID NO: 67
  Synthetic Construct

SEQ ID NO: 148 - DNA, 2217 bp, artificial sequence
  synthetic polynucleotide coding for Mutant4-1570
  CDS (1)..(2217)
atggctgccgatggttatcttccagattggctcgaggacaacctctctgagggcattcgcgagtggtgggcgctgaaacctggagccccgaagcccaaagccaaccagcaaaagcaggacgacggccggggtctggtgcttcctggctacaagtacctcggacccttcaacggactcgacaagggggagcccgtcaacgcggcggacgcagcggccctcgagcacgacaaggcctacgaccagcagctgcaggcgggtgacaatccgtacctgcggtataaccacgccgacgccgagtttcaggagcgtctgcaagaagatacgtcttttgggggcaacctcgggcgagcagtcttccaggccaagaagcgggttctcgaacctctcggtctggttgaggaaggcgctaagacggctcctggaaagaagagaccggtagagccatcaccccagcgttctccagactcctctacgggcatcggcaagaaaggccaacagcccgccagaaaaagactcaattttggtcagactggcgactcagagtcagttccagaccctcaacctctcggagaacctccagcagcgccctctggtgtgggacctaatacaatggctgcaggcggtggcgcaccaatggcagacaataacgaaggcgccgacggagtgggtagttcctcgggaaattggcattgcgattccacatggctgggcgacagagtcatcaccaccagcacccgaacctgggccctgcccacctacaacaaccacctctacaagcaaatctccaacgggacatcgggaggagccaccaacgacaacacctacttcggctacagcaccccctgggggtattttgactttaacagattccactgccacttttcaccacgtgactggcagcgactcatcaacaacaactggggattccggcccaagagactcagcttcaagctcttcaacatccaggtcaaggaggtcacgcagaatgaaggcaccaagaccatcgccaataacctcaccagcaccatccaggtgtttacggactcggagtaccagctgccgtacgttctcggctctgcccaccagggctgcctgcctccgttcccggcggacgtgttcatgattccccagtacggctacctaacactcaacaacggtagtcaggccgtgggacgctcctccttctactgcctggaatactttccttcgcagatgctgagaaccggcaacaacttccagtttacttacaccttcgaggacgtgcctttccacagcagctacgcccacagccagagcttggaccggctgatgaatcctctgattgaccagtacctgtattatctgaacaaaacacaagcaaatagtggaactcttcagcagtctcggctactgtttagtcaagctggacccaccagcatgtctcttcaagctaaaaactggctgcctggaccttgctacagacagcagcgtctgtcaaagcaggcaaacgacaacaacaacagcaactttccctggactgcagctacaaagtatcatctaaatggccgggactcgttggttaatccaggaccagctatggccagccacaaagacgacgaggagcgtttttttcccagtaacgggatcctgatttttggcaaacaaaatgctgccagagacaatgcggattacagcgatgtcatgctcaccagcgaggaagaaatcaaaaccactaaccctgtggctacagaggaatacggtatcgtggcagataacttgcagcagcaaaacacggctcctcaaattggaactgtcaacagccagggggccttacccggtatggtctggcagaaccgggacgtgtacctgcagggtcccatctgggccaagattcctcacacggacggcaacttccacccgtctccgctgatgggcggctttggcctgaaacatcctccgcctcagatcctgatcaagaacacgcctgtacctgcggatcctccgaccaccttcaaccagtcaaagctgaactctttcatcacgcaatacagcaccggacaggtcagcgtggaaattgaatgggagctgcagaaggaaaacagcaagcgctggaaccccgagatccagtacacctccaactactacaaatctacaagtgtggactttgctgttaatacagaaggcgtgtactctgaaccccgccccattggcacccgttacctcacccgtaatctgtaa

SEQ ID NO: 149 - protein, 738 aa, artificial sequence; identical to SEQ ID NO: 68
  Synthetic Construct

SEQ ID NO: 150 - DNA, 2217 bp, artificial sequence
  synthetic polynucleotide coding for Mutant4-1602
  CDS (1)..(2217)
atggctgccgatggttatcttccagattggctcgaggacaacctctctgagggcattcgcgagtggtgggcgctgaaacctggagccccgaagcccaaagccaaccagcaaaagcaggacgacggccggggtctggtgcttcctggctacaagtacctcggacccttcaacggactcgacaagggggagcccgtcaacgcggcggacgcagcggccctcgagcacgacaaggcctacgaccagcagctgcaggcgggtgacaatccgtacctgcggtataaccacgccgacgccgagtttcaggagcgtctgcaagaagatacgtcttttgggggcaacctcgggcgagcagtcttccaggccaagaagcgggttctcgaacctctcggtctggttgaggaaggcgctaagacggctcctggaaagaagagaccggtagagccatcaccccagcgttctccagactcctctacgggcatcggcaagaaaggccaacagcccgccagaaaaagactcaattttggtcagactggcgactcagagtcagttccagaccctcaacctctcggagaacctccagcagcgccctctggtgtgggacctaatacaatggctgcaggcggtggcgcaccaatggcagacaataacgaaggcgccgacggagtgggtagttcctcgggaaattggcattgcgattccacatggctgggcgacagagtcatcaccaccagcacccgaacctgggccctgcccacctacaacaaccacctctacaagcaaatctccaacgggacatcgggaggagccaccaacgacaacacctacttcggctacagcaccccctgggggtattttgactttaacagattccactgccacttttcaccacgtgactggcagcgactcatcaacaacaactggggattccggcccaagagactcagcttcaagctcttcaacatccaggtcaaggaggtcacgcagaatgaaggcaccaagaccatcgccaataacctcaccagcaccatccaggtgtttacggactcggagtaccagctgccgtacgttctcggctctgcccaccagggctgcctgcctccgttcccggcggacgtgttcatgattccccagtacggctacctaacactcaacaacggtagtcaggccgtgggacgctcctccttctactgcctggaatactttccttcgcagatgctgagaaccggcaacaacttccagtttacttacaccttcgaggacgtgcctttccacagcagctacgcccacagccagagcttggaccggctgatgaatcctctgattgaccagtacctgtattatctgaacaagacacaaacaaatagtggaactcttcagcagtctcggctactgtttagccaagctggaccaaccaacatgtctcttcaagctaaaaactggctgcctggaccttgctacagacagcagcgtctgtcaaagcaggcaaacgacaacaacaacagcaactttccctggactgcagctacaaagtatcacctcaatggcagagactctctggtgaatccgggcccggccatggcaagccacaaggacgacgaggagcgtttttttcccagtaacgggatcctgatttttggcaaacaaaatgctgccagagacaatgcggattacagcgatgtcatgctcaccagcgaggaagaaatcaaaaccactaaccctgtggctacagaggaatacggtatcgtggcagataacttgcagcagcaaaacacggctcctcaaattggaactgtcaacagccagggggccttacccggtatggtctggcagaaccgggacgtgtacctgcagggtcccatctgggccaagattcctcacacggacggcaacttccacccgtctccgctgatgggcggctttggcctgaaacatcctccgcctcagatcctgatcaagaacacgcctgtacctgcggatcctccgaccaccttcaaccagtcaaagctgaactctttcatcacgcaatacagcaccggacaggtcagcgtggaaattgaatgggagctgcagaaggaaaacagcaagcgctggaaccccgagatccagtacacctccaactactacaaatctacaagtgtggactttgctgttaatacagaaggcgtgtactctgaaccccgccccattggcacccgttacctcacccgtaatctgtaa

SEQ ID NO: 151 - protein, 738 aa, artificial sequence; identical to SEQ ID NO: 69
  Synthetic Construct

SEQ ID NO: 152 - DNA, 2217 bp, artificial sequence
  synthetic polynuclotide coding for Mutant4-667
  CDS (1)..(2217)
atggctgccgatggttatcttccagattggctcgaggacaacctctctgagggcattcgcgagtggtgggcgctgaaacctggagccccgaagcccaaagccaaccagcaaaagcaggacgacggccggggtctggtgcttcctggctacaagtacctcggacccttcaacggactcgacaagggggagcccgtcaacgcggcggacgcagcggccctcgagcacgacaaggcctacgaccagcagctgcaggcgggtgacaatccgtacctgcggtataaccacgccgacgccgagtttcaggagcgtctgcaagaagatacgtcttttgggggcaacctcgggcgagcagtcttccaggccaagaagcgggttctcgaacctctcggtctggttgaggaaggcgctaagacggctcctggaaagaagagaccggtagagccatcaccccagcgttctccagactcctctacgggcatcggcaagaaaggccaacagcccgccagaaaaagactcaattttggtcagactggcgactcagagtcagttccagaccctcaacctctcggagaacctccagcagcgccctctggtgtgggacctaatacaatggctgcaggcggtggcgcaccaatggcagacaataacgaaggcgccgacggagtgggtagttcctcgggaaattggcattgcgattccacatggctgggcgacagagtcatcaccaccagcacccgaacctgggccctgcccacctacaacaaccacctctacaagcaaatctccaacgggacatcgggaggagccaccaacgacaacacctacttcggctacagcaccccctgggggtattttgactttaacagattccactgccacttttcaccacgtgactggcagcgactcatcaacaacaactggggattccggcccaagagactcagcttcaagctcttcaacatccaggtcaaggaggtcacgcagaatgaaggcaccaagaccatcgccaataacctcaccagcaccatccaggtgtttacggactcggagtaccagctgccgtacgttctcggctctgcccaccagggctgcctgcctccgttcccggcggacgtgttcatgattccccagtacggctacctaacactcaacaacggtagtcaggccgtgggacgctcctccttctactgcctggaatactttccttcgcagatgctgagaaccggcaacaacttccagtttacttacaccttcgaggacgtgcctttccacagcagctacgcccacagccagagcttggaccggctgatgaatcctctgattgaccagtacctgtattacttgagcagaacaaacactccaagtggaaccaccacgcagtctcggctactgtttagtcaagctggacccaccagcatgtctcttcaagctaaaaactggctgcctggaccttgctacagacagcagcgtctgtcaaagcaggcaaacgacaacaacaacagcaactttccctggactgcggctacaaagtatcatctaaatggccgggactcgttggttaatccaggaccagctatggccagccacaaggacgacgaggagcgtttttttcccagtaacgggatcctgatttttggcaaacaaaatgctgccagagacaatgcggattacagcgatgtcatgctcaccagcgaggaagaaatcaaaaccactaaccctgtggctacagaggaatacggtatcgtggcagataacttgcagcagcaaaacacggctcctcaaattggaactgtcaacagccagggggccttacccggtatggtctggcagaaccgggacgtgtacctgcagggtcccatctgggccaagattcctcacacggacggcaacttccacccgtctccgctgatgggcggctttggcctgaaacatcctccgcctcagatcctgatcaagaacacgcctgtacctgcggatcctccgaccaccttcaaccagtcaaagctgaactctttcatcacgcaatacagcaccggacaggtcagcgtggaaattgaatgggagctgcagaaggaaaacagcaagcgctggaaccccgagatccagtacacctccaactactacaaatctacaagtgtggactttgctgttaatacagaaggcgtgtactctgaaccccgccccattggcacccgttacctcacccgtaatctgtaa

SEQ ID NO: 153 - protein, 738 aa, artificial sequence; identical to SEQ ID NO: 70
  Synthetic Construct

SEQ ID NO: 154 - DNA, 2217 bp, artificial sequence
  synthetic polynucleotide coding for Mutant4-129
  CDS (1)..(2217)
atggctgccgatggttatcttccagattggctcgaggacaacctctctgagggcattcgcgagtggtgggcgctgaaacctggagccccgaagcccaaagccaaccagcaaaagcaggacgacggccggggtctggtgcttcctggctacaagtacctcggacccttcaacggactcgacaagggggagcccgtcaacgcggcggacgcagcggccctcgagcacgacaaggcctacgaccagcagctgcaggcgggtgacaatccgtacctgcggtataaccacgccgacgccgagtttcaggagcgtctgcaagaagatacgtcttttgggggcaacctcgggcgagcagtcttccaggccaagaagcgggttctcgaacctctcggtctggttgaggaaggcgctaagacggctcctggaaagaagagaccggtagagccatcaccccagcgttctccagactcctctacgggcatcggcaagaaaggccaacagcccgccagaaaaagactcaattttggtcagactggcgactcagagtcagttccagaccctcaacctctcggagaacctccagcagcgccctctggtgtgggacctaatacaatggctgcaggcggtggcgcaccaatggcagacaataacgaaggcgccgacggagtgggtagttcctcgggaaattggcattgcgattccacatggctgggcgacagagtcatcaccaccagcacccgaacctgggccctgcccacctacaacaaccacctctacaagcaaatctccaacgggacatcgggaggagccaccaacgacaacacctacttcggctacagcaccccctgggggtattttgactttaacagattccactgccacttttcaccacgtgactggcagcgactcatcaacaacaactggggattccggcccaagagactcagcttcaagctcttcaacatccaggtcaaggaggtcacgcagaatgaaggcaccaagaccatcgccaataacctcaccagcaccatccaggtgtttacggactcggagtaccagctgccgtacgttctcggctctgcccaccagggctgcctgcctccgttcccggcggacgtgttcatgattccccagtacggctacctaacactcaacaacggtagtcaggccgtgggacgctcctccttctactgcctggaatactttccttcgcagatgctgagaaccggcaacaacttccagtttacttacaccttcgaggacgtgcctttccacagcagctacgcccacagccagagcttggaccggctgatgaatcctctgattgaccagtacctgtattatctaaacagaacacaaacaaccagtggaactcccacgcagtctcggctactgtttagccaagctggacccacaagcatgtctcttcaagctaaaaactggctgcctggaccgtgttatcgccagcagcgtttgtcaaagcaggcaaacgacaacaacaacagcaactttccctggactggagctaccaagtaccacctcaatggcagagactctttggtgaacccgggcccggccatggccagccacaaggacgacgaggagcgtttttttcccagtaacgggatcctgatttttggcaaacaaaatgctgccagagacaatgcggattacagcgatgtcatgctcaccagcgaggaagaaatcaaaaccactaaccctgtggctacagaggaatacggtatcgtggcagataacttgcagcagcaaaacacggctcctcaaattggaactgtcaacagccagggggccttacccggtatggtctggcagaaccgggacgtgtacctgcagggtcccatctgggccaagattcctcacacggacggcaacttccacccgtctccgctgatgggcggctttggcctgaaacatcctccgcctcagatcctgatcaagaacacgcctgtacctgcggatcctccgaccaccttcaaccagtcaaagctgaactctttcatcacgcaatacagcaccggacaggtcagcgtggaaattgaatgggagctgcagaaggaaaacagcaagcgctggaaccccgagatccagtacacctccaactactacaaatctacaagtgtggactttgctgttaatacagaaggcgtgtactctgaaccccgccccattggcacccgttacctcacccgtaatctgtaa

SEQ ID NO: 155 - protein, 738 aa, artificial sequence; identical to SEQ ID NO: 71
  Synthetic Construct

SEQ ID NO: 156 - DNA, 2214 bp, artificial sequence
  synthetic polynucleotide coding for Mutant4-767
  CDS (1)..(2214)
atggctgccgatggttatcttccagattggctcgaggacaacctctctgagggcattcgcgagtggtgggcgctgaaacctggagccccgaagcccaaagccaaccagcaaaagcaggacgacggccggggtctggtgcttcctggctacaagtacctcggacccttcaacggactcgacaagggggagcccgtcaacgcggcggacgcagcggccctcgagcacgacaaggcctacgaccagcagctgcaggcgggtgacaatccgtacctgcggtataaccacgccgacgccgagtttcaggagcgtctgcaagaagatacgtcttttgggggcaacctcgggcgagcagtcttccaggccaagaagcgggttctcgaacctctcggtctggttgaggaaggcgctaagacggctcctggaaagaagagaccggtagagccatcaccccagcgttctccagactcctctacgggcatcggcaagaaaggccaacagcccgccagaaaaagactcaattttggtcagactggcgactcagagtcagttccagaccctcaacctctcggagaacctccagcagcgccctctggtgtgggacctaatacaatggctgcaggcggtggcgcaccaatggcagacaataacgaaggcgccgacggagtgggtagttcctcgggaaattggcattgcgattccacatggctgggcgacagagtcatcaccaccagcacccgaacctgggccctgcccacctacaacaaccacctctacaagcaaatctccaacgggacatcgggaggagccaccaacgacaacacctacttcggctacagcaccccctgggggtattttgactttaacagattccactgccacttttcaccacgtgactggcagcgactcatcaacaacaactggggattccggcccaagagactcagcttcaagctcttcaacatccaggtcaaggaggtcacgcagaatgaaggcaccaagaccatcgccaataacctcaccagcaccatccaggtgtttacggactcggagtaccagctgccgtacgttctcggctctgcccaccagggctgcctgcctccgttcccggcggacgtgttcatgattccccagtacggctacctaacactcaacaacggtagtcaggccgtgggacgctcctccttctactgcctggaatactttccttcgcagatgctgagaaccggcaacaacttccagtttacttacaccttcgaggacgtgcctttccacagcagctacgcccacagccagagcttggaccggctgatgaatcctctgattgaccagtacctgtattatctgaacaaaacacaatctagtggaactcttcagcagtctcggttactgtttagtcaagctggacccaccagcatgtctcttcaagctaggaactggcttcctggaccctgttaccgccagcagcgagtatcaaagacatctgcggataaaaacaacagtgaatactcgtggactgcggctacaaagtatcatctaaatggccgggactcgttggttaatccaggaccagctatggccagccacaaagacgacgaggagcgtttttttcccagtaacgggatcctgatttttggcaaacaaaatgctgccagagacaatgcggattacagcgatgtcatgctcaccagcgaggaagaaatcaaaaccactaaccctgtggctacagaggaatacggtatcgtggcagataacttgcagcagcaaaacacggctcctcaaattggaactgtcaacagccagggggccttacccggtatggtctggcagaaccgggacgtgtacctgcagggtcccatctgggccaagattcctcacacggacggcaacttccacccgtctccgctgatgggcggctttggcctgaaacatcctccgcctcagatcctgatcaagaacacgcctgtacctgcggatcctccgaccaccttcaaccagtcaaagctgaactctttcatcacgcaatacagcaccggacaggtcagcgtggaaattgaatgggagctgcagaaggaaaacagcaagcgctggaaccccgagatccagtacacctccaactactacaaatctacaagtgtggactttgctgttaatacagaaggcgtgtactctgaaccccgccccattggcacccgttacctcacccgtaatctgtaa

SEQ ID NO: 157 - protein, 737 aa, artificial sequence; identical to SEQ ID NO: 72
  Synthetic Construct

SEQ ID NO: 158 - DNA, 2214 bp, artificial sequence
  synthetic polynucleotide coding for AAV9-R5-704
  CDS (1)..(2214)
atggctgccgatggttatcttccagattggctcgaggacaaccttagtgaaggaattcgcgagtggtgggctttgaaacctggagcccctcaacccaaggcaaatcaacaacatcaagacaacgctcgaggtcttgtgcttccgggttacaaataccttggacccggcaacggactcgacaagggggagccggtcaacgcagcagacgcggcggccctcgagcacgacaaggcctacgaccagcagctcaaggccggagacaacccgtacctcaagtacaaccacgccgacgccgagttccaggagcggctcaaagaagatacgtcttttgggggcaacctcgggcgagcagtcttccaggccaaaaagaggcttcttgaacctcttggtctggttgaggaagcggctaagacggctcctggaaagaagaggcctgtagagcagtctcctcaggaaccggactcctccgcgggtattggcaaatcgggtgcacagcccgctaaaaagagactcaatttcggtcagactggcgacacagagtcagtcccagaccctcaaccaatcggagaacctcccgcagccccctcaggtgtgggatctcttacaatggcttcaggtggtggcgcaccagtggcagacaataacgaaggtgccgatggagtgggtagttcctcgggaaattggcattgcgattcccaatggctgggggacagagtcatcaccaccagcacccgaacctgggccctgcccacctacaacaatcacctctacaagcaaatctccaacagcacatctggaggatcttcaaatgacaacgcctacttcggctacagcaccccctgggggtattttgacttcaacagattccactgccacttctcaccacgtgactggcagcgactcatcaacaacaactggggattccggcctaagcgactcaacttcaagctcttcaacattcaggtcaaagaggttacggacaacaatggagtcaagaccatcgccaataaccttaccagcacggtccaggtcttcacggactcagactatcagctcccgtacgtgctcgggtcggctcacgagggctgcctcccgccgttcccagcggacgttttcatgattcctcagtacgggtatctgacgcttaatgatggaagccaggccgtgggtcgttcgtccttttactgcctggaatatttcccgtcgcaaatgctaagaacgggtaacaacttccagttcagctacgagtttgagaacgtacctttccatagcagctacgctcacagccaaagcctggaccgactaatgaatccactcatcgaccaatacttgtactatctgaacaagacacaatcaaatagtggaactcttcagcagtctcggctactgtttagtcaagctggacccaccagcatgtctcttcaagctaaaaactggctgcctggacctagctaccgacaacaacgtgtctcaaccactgtgactcaaaacaacaacagcgaatttgcttggcctggagcttcttcttgggctctcaatggacgtaatagcttgatgaatcctggacctgctatggccagccacaaagaaggagaggaccgtttctttcctttgtctggatctttaatttttggcaaacaaggaactggaagagacaacgtggatgcggacaaagtcatgataaccaacgaagaagaaattaaaactactaacccggtagcaacggagtcctatggacaagtggccacaaaccaccagagtgcccaagcacaggcgcagaccggctgggttcaaaaccaaggaatacttccgggtatggtttggcaggacagagatgtgtacctgcaaggacccatttgggccaaaattcctcacacggacggcaactttcacccttctccgctgatgggagggtttggaatgaagcacccgcctcctcagatcctcatcaaaaacacacctgtacctgcggatcctccaacggccttcaacaaggacaagctgaactctttcatcacccagtattctactggccaagtcagcgtggagatcgagtgggagctgcagaaggaaaacagcaagcgctggaacccggagatccagtacacttccaactattacaagtctaataatgttgaatttgctgttaatactgaaggtgtatatagtgaaccccgccccattggcaccagatacctgactcgtaatctgtaa

SEQ ID NO: 159 - protein, 737 aa, artificial sequence; identical to SEQ ID NO: 73
  Synthetic Construct

SEQ ID NO: 160 - protein, 738 aa, adeno-associated virus rh74
MAADGYLPDWLEDNLSEGIREWWDLKPGAPKPKANQQKQDNGRGLVLPGYKYLGPFNGLDKGEPVNAADAAALEHDKAYDQQLQAGDNPYLRYNHADAEFQERLQEDTSFGGNLGRAVFQAKKRVLEPLGLVESPVKTAPGKKRPVEPSPQRSPDSSTGIGKKGQQPAKKRLNFGQTGDSESVPDPQPIGEPPAGPSGLGSGTMAAGGGAPMADNNEGADGVGSSSGNWHCDSTWLGDRVITTSTRTWALPTYNNHLYKQISNGTSGGSTNDNTYFGYSTPWGYFDFNRFHCHFSPRDWQRLINNNWGFRPKRLNFKLFNIQVKEVTQNEGTKTIANNLTSTIQVFTDSEYQLPYVLGSAHQGCLPPFPADVFMIPQYGYLTLNNGSQAVGRSSFYCLEYFPSQMLRTGNNFEFSYNFEDVPFHSSYAHSQSLDRLMNPLIDQYLYYLSRTQSTGGTAGTQQLLFSQAGPNNMSAQAKNWLPGPCYRQQRVSTTLSQNNNSNFAWTGATKYHLNGRDSLVNPGVAMATHKDDEERFFPSSGVLMFGKQGAGKDNVDYSSVMLTSEEEIKTTNPVATEQYGVVADNLQQQNAAPIVGAVNSQGALPGMVWQNRDVYLQGPIWAKIPHTDGNFHPSPLMGGFGLKHPPPQILIKNTPVPADPPTTFNQAKLASFITQYSTGQVSVEIEWELQKENSKRWNPEIQYTSNYYKSTNVDFAVNTEGTYSEPRPIGTRYLTRNL

SEQ ID NO: 161 - DNA, 2217 bp, adeno-associated virus rh74
atggctgccgatggttatcttccagattggctcgaggacaacctctctgagggcattcgcgagtggtgggacctgaaacctggagccccgaaacccaaagccaaccagcaaaagcaggacaacggccggggtctggtgcttcctggctacaagtacctcggacccttcaacggactcgacaagggggagcccgtcaacgcggcggacgcagcggccctcgagcacgacaaggcctacgaccagcagctccaagcgggtgacaatccgtacctgcggtataatcacgccgacgccgagtttcaggagcgtctgcaagaagatacgtcttttgggggcaacctcgggcgcgcagtcttccaggccaaaaagcgggttctcgaacctctgggcctggttgaatcgccggttaagacggctcctggaaagaagagaccggtagagccatcaccccagcgctctccagactcctctacgggcatcggcaagaaaggccagcagcccgcaaaaaagagactcaattttgggcagactggcgactcagagtcagtccccgaccctcaaccaatcggagaaccaccagcaggcccctctggtctgggatctggtacaatggctgcaggcggtggcgctccaatggcagacaataacgaaggcgccgacggagtgggtagttcctcaggaaattggcattgcgattccacatggctgggcgacagagtcatcaccaccagcacccgcacctgggccctgcccacctacaacaaccacctctacaagcaaatctccaacgggacctcgggaggaagcaccaacgacaacacctacttcggctacagcaccccctgggggtattttgacttcaacagattccactgccacttttcaccacgtgactggcagcgactcatcaacaacaactggggattccggcccaagaggctcaacttcaagctcttcaacatccaagtcaaggaggtcacgcagaatgaaggcaccaagaccatcgccaataaccttaccagcacgattcaggtctttacggactcggaataccagctcccgtacgtgctcggctcggcgcaccagggctgcctgcctccgttcccggcggacgtcttcatgattcctcagtacgggtacctgactctgaacaatggcagtcaggctgtgggccggtcgtccttctactgcctggagtactttccttctcaaatgctgagaacgggcaacaactttgaattcagctacaacttcgaggacgtgcccttccacagcagctacgcgcacagccagagcctggaccggctgatgaaccctctcatcgaccagtacttgtactacctgtcccggactcaaagcacgggcggtactgcaggaactcagcagttgctattttctcaggccgggcctaacaacatgtcggctcaggccaagaactggctacccggtccctgctaccggcagcaacgcgtctccacgacactgtcgcagaacaacaacagcaactttgcctggacgggtgccaccaagtatcatctgaatggcagagactctctggtgaatcctggcgttgccatggctacccacaaggacgacgaagagcgattttttccatccagcggagtcttaatgtttgggaaacagggagctggaaaagacaacgtggactatagcagcgtgatgctaaccagcgaggaagaaataaagaccaccaacccagtggccacagaacagtacggcgtggtggccgataacctgcaacagcaaaacgccgctcctattgtaggggccgtcaatagtcaaggagccttacctggcatggtgtggcagaaccgggacgtgtacctgcagggtcccatctgggccaagattcctcatacggacggcaactttcatccctcgccgctgatgggaggctttggactgaagcatccgcctcctcagatcctgattaaaaacacacctgttcccgcggatcctccgaccaccttcaatcaggccaagctggcttctttcatcacgcagtacagtaccggccaggtcagcgtggagatcgagtgggagctgcagaaggagaacagcaaacgctggaacccagagattcagtacacttccaactactacaaatctacaaatgtggactttgctgtcaatactgagggtacttattccgagcctcgccccattggcacccgttacctcacccgtaatctgtaa

SEQ ID NO: 162 - protein, 737 aa, artificial sequence
  synthetic polypeptide AAV9.rh74
MAADGYLPDWLEDNLSEGIREWWALKPGAPQPKANQQHQDNARGLVLPGYKYLGPGNGLDKGEPVNAADAAALEHDKAYDQQLKAGDNPYLKYNHADAEFQERLKEDTSFGGNLGRAVFQAKKRLLEPLGLVEEAAKTAPGKKRPVEQSPQEPDSSAGIGKSGAQPAKKRLNFGQTGDTESVPDPQPIGEPPAAPSGVGSLTMASGGGAPVADNNEGADGVGSSSGNWHCDSQWLGDRVITTSTRTWALPTYNNHLYKQISNSTSGGSSNDNAYFGYSTPWGYFDFNRFHCHFSPRDWQRLINNNWGFRPKRLNFKLFNIQVKEVTDNNGVKTIANNLTSTVQVFTDSDYQLPYVLGSAHEGCLPPFPADVFMIPQYGYLTLNDGSQAVGRSSFYCLEYFPSQMLRTGNNFQFSYEFENVPFHSSYAHSQSLDRLMNPLIDQYLYYLSRTQSTGGTAGTQQLLFSQAGPNNMSAQAKNWLPGPCYRQQRVSTTLSQNNNSNFAWTGATKYHLNGRDSLVNPGVAMATHKDDEERFFPSSGVLMFGKQGAGKDNVDYSSVMLTSEEEIKTTNPVATEQYGVVADNLQQQNAAPIVGAVNSQGALPGMVWQNRDVYLQGPIWAKIPHTDGNFHPSPLMGGFGMKHPPPQILIKNTPVPADPPTAFNKDKLNSFITQYSTGQVSVEIEWELQKENSKRWNPEIQYTSNYYKSNNVEFAVNTEGVYSEPRPIGTRYLTRNL

SEQ ID NO: 163 - DNA, 2215 bp, artificial sequence
  synthetic polynucloetide coding for AAV9.rh74
atggctgccgatggttatcttccagattggctcgaggacaaccttagtgaaggaattcgcgagtggtgggctttgaaacctggagcccctcaacccaaggcaaatcaacaacatcaagacaacgctcgaggtcttgtgcttccgggttacaaataccttggacccggcaacggactcgacaagggggagccggtcaacgcagcagacgcggcggccctcgagcacgacaaggcctacgaccagcagctcaaggccggagacaacccgtacctcaagtacaaccacgccgacgccgagttccaggagcggctcaaagaagatacgtcttttgggggcaacctcgggcgagcagtcttccaggccaaaaagaggcttcttgaacctcttggtctggttgaggaagcggctaagacggctcctggaaagaagaggcctgtagagcagtctcctcaggaaccggactcctccgcgggtattggcaaatcgggtgcacagcccgctaaaaagagactcaatttcggtcagactggcgacacagagtcagtcccagaccctcaaccaatcggagaacctcccgcagccccctcaggtgtgggatctcttacaatggcttcaggtggtggcgcaccagtggcagacaataacgaaggtgccgatggagtgggtagttcctcgggaaattggcattgcgattcccaatggctgggggacagagtcatcaccaccagcacccgaacctgggccctgcccacctacaacaatcacctctacaagcaaatctccaacagcacatctggaggatcttcaaatgacaacgcctacttcggctacagcaccccctgggggtattttgacttcaacagattccactgccacttctcaccacgtgactggcagcgactcatcaacaacaactggggattccggcctaagcgactcaacttcaagctcttcaacattcaggtcaaagaggttacggacaacaatggagtcaagaccatcgccaataaccttaccagcacggtccaggtcttcacggactcagactatcagctcccgtacgtgctcgggtcggctcacgagggctgcctcccgccgttcccagcggacgttttcatgattcctcagtacgggtatctgacgcttaatgatggaagccaggccgtgggtcgttcgtccttttactgcctggaatatttcccgtcgcaaatgctaagaacgggtaacaacttccagttcagctacgagtttgagaacgtacctttccatagcagctacgctcacagccaaagcctggaccgactaatgaatccactcatcgaccaatacttgtactatctctcacggactcaaagcacgggcggtactgcaggaactcagcagttgctattttctcaggccgggcctaacaacatgtcggctcaggccaagaactggctacccggtccctgctaccggcagcaacgcgtctccacgacactgtcgcagaacaacaacagcaactttgcctggacgggtgccaccaagtatcatctgaatggcagagactctctggtgaatcctggcgttgccatggctacccacaaggacgacgaagagcgattttttccatccagcggagtcttaatgtttgggaaacagggagctggaaaagacaacgtggactatagcagcgtgatgctaaccagcgaggaagaaataaagaccaccaacccagtggccacagaacagtacggcgtggtggccgataacctgcaacagcaaaacgccgctcctattgtaggggccgtcaatagtcaaggagccttacctggcatggtgtggcagaacagagatgtgtacctgcaaggacccatttgggccaaaattcctcacacggacggcaactttcacccttctccgctgatgggagggtttggaatgaagcacccgcctcctcagatcctcatcaaaaacacacctgtacctgcggatcctccaacggccttcaacaaggacaagctgaactctttcatcacccagtattctactggccaagtcagcgtggagatcgagtgggagctgcagaaggaaaacagcaagcgctggaacccggagatccagtacacttccaactattacaagtctaataatgttgaatttgctgttaatactgaaggtgtatatagtgaaccccgccccattggcaccagatacctgactcgtaatctgtaat

SEQ ID NO: 164 - protein, 746 aa, artificial sequence
  synthetic polypeptide AAV9.rh74-P1
MAADGYLPDWLEDNLSEGIREWWALKPGAPQPKANQQHQDNARGLVLPGYKYLGPGNGLDKGEPVNAADAAALEHDKAYDQQLKAGDNPYLKYNHADAEFQERLKEDTSFGGNLGRAVFQAKKRLLEPLGLVEEAAKTAPGKKRPVEQSPQEPDSSAGIGKSGAQPAKKRLNFGQTGDTESVPDPQPIGEPPAAPSGVGSLTMASGGGAPVADNNEGADGVGSSSGNWHCDSQWLGDRVITTSTRTWALPTYNNHLYKQISNSTSGGSSNDNAYFGYSTPWGYFDFNRFHCHFSPRDWQRLINNNWGFRPKRLNFKLFNIQVKEVTDNNGVKTIANNLTSTVQVFTDSDYQLPYVLGSAHEGCLPPFPADVFMIPQYGYLTLNDGSQAVGRSSFYCLEYFPSQMLRTGNNFQFSYEFENVPFHSSYAHSQSLDRLMNPLIDQYLYYLSRTQSTGGTAGTQQLLFSQAGPNNMSAQAKNWLPGPCYRQQRVSTTLSQNNNSNFAWTGATKYHLNGRDSLVNPGVAMATHKDDEERFFPSSGVLMFGKQGAGKDNVDYSSVMLTSEEEIKTTNPVATEQYGVVADNLQGQSGRGDLGLSAQAAIVGAVNSQGALPGMVWQNRDVYLQGPIWAKIPHTDGNFHPSPLMGGFGMKHPPPQILIKNTPVPADPPTAFNKDKLNSFITQYSTGQVSVEIEWELQKENSKRWNPEIQYTSNYYKSNNVEFAVNTEGVYSEPRPIGTRYLTRNL

SEQ ID NO: 165 - DNA, 2241 bp, artificial sequence
  synthetic polynucleotide coding for AAV9.rh74-P1
atggctgccgatggttatcttccagattggctcgaggacaaccttagtgaaggaattcgcgagtggtgggctttgaaacctggagcccctcaacccaaggcaaatcaacaacatcaagacaacgctcgaggtcttgtgcttccgggttacaaataccttggacccggcaacggactcgacaagggggagccggtcaacgcagcagacgcggcggccctcgagcacgacaaggcctacgaccagcagctcaaggccggagacaacccgtacctcaagtacaaccacgccgacgccgagttccaggagcggctcaaagaagatacgtcttttgggggcaacctcgggcgagcagtcttccaggccaaaaagaggcttcttgaacctcttggtctggttgaggaagcggctaagacggctcctggaaagaagaggcctgtagagcagtctcctcaggaaccggactcctccgcgggtattggcaaatcgggtgcacagcccgctaaaaagagactcaatttcggtcagactggcgacacagagtcagtcccagaccctcaaccaatcggagaacctcccgcagccccctcaggtgtgggatctcttacaatggcttcaggtggtggcgcaccagtggcagacaataacgaaggtgccgatggagtgggtagttcctcgggaaattggcattgcgattcccaatggctgggggacagagtcatcaccaccagcacccgaacctgggccctgcccacctacaacaatcacctctacaagcaaatctccaacagcacatctggaggatcttcaaatgacaacgcctacttcggctacagcaccccctgggggtattttgacttcaacagattccactgccacttctcaccacgtgactggcagcgactcatcaacaacaactggggattccggcctaagcgactcaacttcaagctcttcaacattcaggtcaaagaggttacggacaacaatggagtcaagaccatcgccaataaccttaccagcacggtccaggtcttcacggactcagactatcagctcccgtacgtgctcgggtcggctcacgagggctgcctcccgccgttcccagcggacgttttcatgattcctcagtacgggtatctgacgcttaatgatggaagccaggccgtgggtcgttcgtccttttactgcctggaatatttcccgtcgcaaatgctaagaacgggtaacaacttccagttcagctacgagtttgagaacgtacctttccatagcagctacgctcacagccaaagcctggaccgactaatgaatccactcatcgaccaatacttgtactatctctcacggactcaaagcacgggcggtactgcaggaactcagcagttgctattttctcaggccgggcctaacaacatgtcggctcaggccaagaactggctacccggtccctgctaccggcagcaacgcgtctccacgacactgtcgcagaacaacaacagcaactttgcctggacgggtgccaccaagtatcatctgaatggcagagactctctggtgaatcctggcgttgccatggctacccacaaggacgacgaagagcgattttttccatccagcggagtcttaatgtttgggaaacagggagctggaaaagacaacgtggactatagcagcgtgatgctaaccagcgaggaagaaataaagaccaccaacccagtggccacagaacagtacggcgtggtggccgataacctgcaaggccagagtggccgcggcgatctgggcctgagcgcccaggcggccattgtaggggccgtcaatagtcaaggagccttacctggcatggtgtggcagaacagagatgtgtacctgcaaggacccatttgggccaaaattcctcacacggacggcaactttcacccttctccgctgatgggagggtttggaatgaagcacccgcctcctcagatcctcatcaaaaacacacctgtacctgcggatcctccaacggccttcaacaaggacaagctgaactctttcatcacccagtattctactggccaagtcagcgtggagatcgagtgggagctgcagaaggaaaacagcaagcgctggaacccggagatccagtacacttccaactattacaagtctaataatgttgaatttgctgttaatactgaaggtgtatatagtgaaccccgccccattggcaccagatacctgactcgtaatctgtaa

SEQ ID NO: 166 - protein, 736 aa, artificial sequence
  synthetic polypeptide AAV-LK03
MAADGYLPDWLEDNLSEGIREWWALQPGAPKPKANQQHQDNARGLVLPGYKYLGPGNGLDKGEPVNAADAAALEHDKAYDQQLKAGDNPYLKYNHADAEFQERLKEDTSFGGNLGRAVFQAKKRLLEPLGLVEEAAKTAPGKKRPVDQSPQEPDSSSGVGKSGKQPARKRLNFGQTGDSESVPDPQPLGEPPAAPTSLGSNTMASGGGAPMADNNEGADGVGNSSGNWHCDSQWLGDRVITTSTRTWALPTYNNHLYKQISSQSGASNDNHYFGYSTPWGYFDFNRFHCHFSPRDWQRLINNNWGFRPKKLSFKLFNIQVKEVTQNDGTTTIANNLTSTVQVFTDSEYQLPYVLGSAHQGCLPPFPADVFMVPQYGYLTLNNGSQAVGRSSFYCLEYFPSQMLRTGNNFQFSYTFEDVPFHSSYAHSQSLDRLMNPLIDQYLYYLNRTQGTTSGTTNQSRLLFSQAGPQSMSLQARNWLPGPCYRQQRLSKTANDNNNSNFPWTAASKYHLNGRDSLVNPGPAMASHKDDEEKFFPMHGNLIFGKEGTTASNAELDNVMITDEEEIRTTNPVATEQYGTVANNLQSSNTAPTTRTVNDQGALPGMVWQDRDVYLQGPIWAKIPHTDGHFHPSPLMGGFGLKHPPPQIMIKNTPVPANPPTTFSPAKFASFITQYSTGQVSVEIEWELQKENSKRWNPEIQYTSNYNKSVNVDFTVDTNGVYSEPRPIGTRYLTRPL

SEQ ID NO: 167 - protein, 7 aa, artificial sequence
  synthetic peptide P1
RGDLGLS

SEQ ID NO: 168 - protein, 7 aa, artificial sequence
  synthetic peptide
LRGDGLS

SEQ ID NO: 169 - protein, 7 aa, artificial sequence
  synthetic peptide
LGRGDLS

SEQ ID NO: 170 - protein, 7 aa, artificial sequence
  synthetic peptide
LGLRGDS

SEQ ID NO: 171 - protein, 7 aa, artificial sequence
  synthetic peptide
LGLSRGD

SEQ ID NO: 172 - protein, 7 aa, artificial sequence
  synthetic peptide
RGDMSRE

SEQ ID NO: 173 - protein, 4 aa, artificial sequence
  synthetic peptide
GQSG

SEQ ID NO: 174 - protein, 4 aa, artificial sequence
  synthetic peptide
AQAA

SEQ ID NO: 175 - protein, 39 aa, artificial sequence
  synthetic polypeptide HVR5-#704
YYLNKTQSNSGTLQQSRLLFSQAGPTSMSLQAKNWLPGP

SEQ ID NO: 176 - protein, 39 aa, artificial sequence
  synthetic polypeptide HVR5-#1704
YYLNKTQTNSGTLQQSRLLFSQAGPTSMSLQAKNWLPGP

SEQ ID NO: 177 - protein, 39 aa, artificial sequence
  synthetic polypeptide HVR5-#3086
YYLNKTQSNSGTLQQSRLLFSQAGPTNMSLQAKNWLPGP

SEQ ID NO: 178 - protein, 39 aa, artificial sequence
  synthetic polypeptide HVR5#3142
YYLNKTQSNSGTVQQSRLLFSQAGPTSMSLQAKNWLPGP

SEQ ID NO: 179 - protein, 39 aa, artificial sequence
  synthetic polypeptide HVR5-#M258
YYLNKTQSASGTVQQSRLLFSQAGPTSMSLQAKNWLPGP

SEQ ID NO: 180 - protein, 39 aa, artificial sequence
  synthetic polypeptide HVR5-#1570
YYLNKTQANSGTLQQSRLLFSQAGPTSMSLQAKNWLPGP

SEQ ID NO: 181 - protein, 39 aa, artificial sequence
  synthetic polypeptide HVR5-#2731
YYLNKTQSNSGTTTMSRLLFSQAGPTSMSLHAKNWLPGP

SEQ ID NO: 182 - protein, 39 aa, artificial sequence
  synthetic polypeptide HVR5-#1602
YYLNKTQTNSGTLQQSRLLFSQAGPTNMSLQAKNWLPGP

SEQ ID NO: 183 - protein, 39 aa, artificial sequence
  synthetic polypeptide HVR5-#667
YYLSRTNTPSGTTTQSRLLFSQAGPTSMSLQAKNWLPGP

SEQ ID NO: 184 - protein, 39 aa, artificial sequence
  synthetic polypeptide HVR5-#129
YYLNRTQTTSGTPTQSRLLFSQAGPTSMSLQAKNWLPGP

SEQ ID NO: 185 - protein, 38 aa, artificial sequence
  synthetic polyppetide HVR5-#767
YYLNKTQSSGTLQQSRLLFSQAGPTSMSLQARNWLPGP

SEQ ID NO: 186 - protein, 38 aa, artificial sequence
  synthetic polypeptide HVR5-AAV13
YYLNRTQTASGTQQSRLLFSQAGPTSMSLQAKNWLPGP

SEQ ID NO: 187 - protein, 39 aa, artificial sequence
  synthetic polypeptide HVR5-AAV2
YYLSRTNTPSGTTTQSRLQFSQAGASDIRDQSRNWLPGP

SEQ ID NO: 188 - protein, 39 aa, artificial sequence
  synthetic polyppetide HVR5-AAV8
YYLSRTQTTGGTANTQTLGFSQGGPNTMANQAKNWLPGP

SEQ ID NO: 189 - DNA, 117 bp, artificial sequence
  synthetic polynucleotide HVR5-#704
tactatctgaacaagacacaatcaaatagtggaactcttcagcagtctcggctactgtttagtcaagctggacccaccagcatgtctcttcaagctaaaaactggctgcctggacct

SEQ ID NO: 190 - DNA, 117 bp, artificial sequence
  synthetic polynucleotide HVR5-#1704
tattatctgaacaagacacaaacaaatagtggaactcttcagcagtctcggctactgtttagtcaagctggacccaccagcatgtctcttcaagctaaaaactggctgcctggacct

SEQ ID NO: 191 - DNA, 117 bp, artificial sequence
  synthetic polynucleotide HVR5-#3086
tattatctgaacaagacacaatcaaatagtggaactcttcagcagtctcggctactgtttagccaagctggacccaccaacatgtctcttcaagctaaaaactggctgcctggacct

SEQ ID NO: 192 - DNA, 117 bp, artificial sequence
  synthetic polynucleotide HVR5-#3142
tattatctgaacaagacacaatcaaatagtggaactgttcagcagtctcggctactgtttagccaagctggacccaccagcatgtctcttcaagctaaaaactggctgcctggacct

SEQ ID NO: 193 - DNA, 117 bp, artificial sequence
  synthetic polynucleotide HVR5-#M258
tattatctgaacaagacacaatcagccagtggaactgttcagcagtctcggctactgtttagccaagctggacccaccagcatgtctcttcaagctaaaaactggctgcctggacct

SEQ ID NO: 194 - DNA, 117 bp, artificial sequence
  synthetic polynucleotide HVR5-#1570
tattatctgaacaaaacacaagcaaatagtggaactcttcagcagtctcggctactgtttagtcaagctggacccaccagcatgtctcttcaagctaaaaactggctgcctggacct

SEQ ID NO: 195 - DNA, 117 bp, artificial sequence
  synthetic polynucleotide HVR5-#2731
tattatctgaacaaaacacaatcaaatagtggaaccaccacgatgtcaaggctactgtttagtcaagctggacccaccagcatgtctcttcacgctaaaaactggctgcctggacct

SEQ ID NO: 196 - DNA, 117 bp, artificial sequence
  synthetic polynucleotide HVR5-#1602
tattatctgaacaagacacaaacaaatagtggaactcttcagcagtctcggctactgtttagccaagctggaccaaccaacatgtctcttcaagctaaaaactggctgcctggacct

SEQ ID NO: 197 - DNA, 117 bp, artificial sequence
  synthetic polynucleotide HVR5-#667
tattacttgagcagaacaaacactccaagtggaaccaccacgcagtctcggctactgtttagtcaagctggacccaccagcatgtctcttcaagctaaaaactggctgcctggacct

SEQ ID NO: 198 - DNA, 117 bp, artificial sequence
  synthetic polynucleotide HVR5-#129
tattatctaaacagaacacaaacaaccagtggaactcccacgcagtctcggctactgtttagccaagctggacccacaagcatgtctcttcaagctaaaaactggctgcctggaccg

SEQ ID NO: 199 - DNA, 114 bp, artificial sequence
  synthetic polynucleotide HVR5-#767
tattatctgaacaaaacacaatctagtggaactcttcagcagtctcggttactgtttagtcaagctggacccaccagcatgtctcttcaagctaggaactggcttcctggaccc

SEQ ID NO: 200 - DNA, 114 bp, artificial sequence
  synthetic polynucleotide HVR5-AAV13
tattatctaaacaggacacaaacagccagtggaactcagcagtctcggctactgtttagccaagctggacccaccagcatgtctcttcaagctaaaaactggctgcctggacct

SEQ ID NO: 201 - DNA, 117 bp, artificial sequence
  synthetic polynucleotide HVR5-#AAV2
tattacttgagcagaacaaacactccaagtggaaccaccacgcagtcaaggcttcagttttctcaggccggagcgagtgacattcgggaccagtctaggaactggcttcctggaccc

SEQ ID NO: 202 - protein, 733 aa, adeno-associated virus 13
MTDGYLPDWLEDNLSEGVREWWALQPGAPKPKANQQHQDNARGLVLPGYKYLGPGNGLDKGEPVNAADAAALEHDKAYDQQLKAGDNPYLKYNHADAEFQERLQEDTSFGGNLGRAVFQAKKRILEPLGLVEEAAKTAPGKKRPVEQSPAEPDSSSGIGKSGQQPARKRLNFGQTGDTESVPDPQPLGQPPAAPSGVGSTTMASGGGAPMADNNEGADGVGNSSGNWHCDSQWLGDRVITTSTRTWALPTYNNHLYKQISSQSGATNDNHYFGYSTPWGYFDFNRFHCHFSPRDWQRLINNNWGFRPKRLNFKLFNIQVKEVTQNDGTTTIANNLTSTVQVFTDSEYQLPYVLGSAHQGCLPPFPADVFMVPQYGYLTLNNGSQAVGRSSFYCLEYFPSQMLRTGNNFQFSYTFEDVPFHSSYAHSQSLDRLMNPLIDQYLYYLNRTQTASGTQQSRLLFSQAGPTSMSLQAKNWLPGPCYRQQRLSKQANDNNNSNFPWTGATKYHLNGRDSLVNPGPAMASHKDDKEKFFPMHGTLIFGKEGTNANNADLENVMITDEEEIRTTNPVATEQYGTVSNNLQNSNAGPTTGTVNHQGALPGMVWQDRDVYLQGPIWAKIPHTDGHFHPSPLMGGFGLKHPPPQIMIKNTPVPANPPTNFSAAKFASFITQYSTGQVSVEIEWELQKENSKRWNPEIQYTSNYNKSVNVDFTVDTNGVYSEPRPIGTRYLTRNL
